(19) United States
(12) Patent Application Publication
(10) Pub. No.: US 2023/0287079 A1
(43) Pub. Date: Sep. 14, 2023

(54) BINDING PROTEINS RECOGNIZING SARS-COV-2 ANTIGENS AND USES THEREOF

(71) Applicants: TScan Therapeutics, Inc., Waltham, MA (US); AHS Hospital Corp., Morristown, NJ (US)

(72) Inventors: Tomasz Kula, Brookline, MA (US); Given MacBeath, Wakefield, MA (US); Andrew P. Ferretti, Waltham, MA (US); Yifan Wang, Arlington, MA (US)

(21) Appl. No.: 18/009,878

(22) PCT Filed: Jul. 20, 2021
(86) PCT No.: PCT/US2021/042326

§ 371 Date: Dec. 12, 2022

Related U.S. Application Data
(60) Provisional application No. 63/111,448, filed on Nov. 9, 2020.
(60) Provisional application No. 63/069,926, filed on Aug. 25, 2020.
(60) Provisional application No. 63/056,945, filed on Jul. 27, 2020.
(60) Provisional application No. 63/056,511, filed on Jul. 24, 2020.

(51) Int. Cl. C07K 14/725; G01N 33/569; A61P 31/14; A61K 35/17

(52) U.S. Cl. CPC C07K 14/7051; G01N 33/56983; A61P 31/14; A61K 35/17; C07K 2319/33; G01N 2469/10; G01N 2333/165; G01N 2800/56; G01N 2800/52

(57) ABSTRACT

Provided herein are binding proteins recognizing SARS-CoV-2 antigens and uses thereof.

### CROSS-REFERENCE TO RELATED APPLICATIONS

[0001] This application claims the benefit of priority to U.S. Provisional Application Ser. No. 63/056,511, filed on 24 Jul. 2020; U.S. Provisional Application Ser. No. 63/056,945, filed on 27 Jul. 2020; U.S. Provisional Application Ser. No. 63/069,926, filed on 25 Aug. 2020; and U.S. Provisional Application Ser. No. 63/111,448, filed on 9 Nov. 2020; the entire contents of each of said applications are incorporated herein in their entirety by this reference.

### BACKGROUND OF THE INVENTION

[0002] Cytotoxic lymphocytes, such as cytotoxic T cells and natural killer (NK) cells, play a critical role in controlling acute viral infection and provide durable immune protection from subsequent exposures. Coronavirus disease 2019 (COVID-19), which is caused by infections with SARS-CoV-2, is a widespread viral infection that has caused more than 418,000 death worldwide as of June 2020. SARS-CoV-2 is the seventh coronavirus known to infect humans; SARS-CoV, MERS-CoV and SARS-CoV-2 can cause severe disease, whereas HKU1, NL63, OC43 and 229E are associated with symptoms. There is an urgent need for understanding cytotoxic lymphocyte reactivities against SARS-CoV-2 and developing effective therapeutic, diagnostic, and prognostic approaches for addressing COVID-19.

### SUMMARY OF THE INVENTION

[0003] The present invention is based, at least in part, on the discovery of binding proteins, including T cell receptors (TCRs), that recognize SARS-CoV-2 antigens (e.g., immunodominant peptides).

[0004] In one aspect, provided herein is a binding protein comprising: a) a T cell receptor (TCR) alpha chain CDR sequence with at least about 80% identity to a TCR alpha chain CDR sequence selected from the group consisting of TCR alpha chain CDR sequences listed in Tables 1A-01 to 1A-05, 1B-01 to 1B-04, 1C-01 to 1C-03, 1D-01 to 1D-03, 1E-01 to 1E-02, and 1F-01 to 1F-03; and/or b) a TCR beta chain CDR sequence with at least about 80% identity to a TCR beta chain CDR sequence selected from the group consisting of TCR beta chain CDR sequences listed in Tables 1A-01 to 1A-05, 1B-01 to 1B-04, 1C-01 to 1C-03, 1D-01 to 1D-03, 1E-01 to 1E-02, and 1F-01 to 1F-03, wherein the binding protein is capable of binding to a SARS-CoV-2 immunodominant peptide-MHC (pMHC) complex, optionally wherein the binding affinity has a K_{d} less than or equal to about 5×10⁻⁴ M.

[0005] In another aspect, provided herein is a binding protein comprising: a) a TCR alpha chain variable (V_{α}) domain sequence with at least about 80% identity to a TCR V_{α} domain sequence selected from the group consisting of TCR V_{α} domain sequences listed in Tables 1A-01 to 1A-05, 1B-01 to 1B-04, 1C-01 to 1C-03, 1D-01 to 1D-03, 1E-01 to 1E-02, and 1F-01 to 1F-03; and/or b) a TCR beta chain variable (V_{β}) domain sequence with at least about 80% identity to a TCR V_{β} domain sequence selected from the group consisting of TCR V_{β} domain sequences listed in Tables 1A-01 to 1A-05, 1B-01 to 1B-04, 1C-01 to 1C-03, 1D-01 to 1D-03, 1E-01 to 1E-02, and 1F-01 to 1F-03, wherein the binding protein is capable of binding to a SARS-CoV-2 immunodominant peptide-MHC (pMHC) complex, optionally wherein the binding affinity has a K_{d} less than or equal to about 5×10⁻⁴ M.

[0006] In still another aspect, provided herein is a binding protein comprising: a) a TCR alpha chain sequence with at least about 80% identity to a TCR alpha chain sequence selected from the group consisting of TCR alpha chain sequences listed in Tables 1A-01 to 1A-05, 1B-01 to 1B-04, 1C-01 to 1C-03, 1D-01 to 1D-03, 1E-01 to 1E-02, and 1F-01 to 1F-03; and/or b) a TCR beta chain sequence with at least about 80% identity to a TCR beta chain sequence selected from the group consisting of TCR beta chain sequences listed in Tables 1A-01 to 1A-05, 1B-01 to 1B-04, 1C-01 to 1C-03, 1D-01 to 1D-03, 1E-01 to 1E-02, and 1F-01 to 1F-03, wherein the binding protein is capable of binding to a SARS-CoV-2 immunodominant peptide-MHC (pMHC) complex, optionally wherein the binding affinity has a K_{d} less than or equal to about 5×10⁻⁴ M.

[0007] In yet another aspect, provided herein is a binding protein comprising: a) a TCR alpha chain CDR sequence selected from the group consisting of TCR alpha chain CDR sequences listed in Tables 1A-01 to 1A-05, 1B-01 to 1B-04, 1C-01 to 1C-03, 1D-01 to 1D-03, 1E-01 to 1E-02, and 1F-01 to 1F-03; and/or b) a TCR beta chain CDR sequence selected from the group consisting of TCR beta chain CDR sequences listed in Tables 1A-01 to 1A-05, 1B-01 to 1B-04, 1C-01 to 1C-03, 1D-01 to 1D-03, 1E-01 to 1E-02, and 1F-01 to 1F-03, wherein the binding protein is capable of binding to a SARS-CoV-2 immunodominant peptide-MHC (pMHC) complex, optionally wherein the binding affinity has a K_{d} less than or equal to about 5×10⁻⁴ M.

[0008] In another aspect, provided herein is a binding protein comprising: a) a TCR alpha chain variable (V_{α}) domain sequence selected from the group consisting of TCR V_{α} domain sequences listed in Tables 1A-01 to 1A-05, 1B-01 to 1B-04, 1C-01 to 1C-03, 1D-01 to 1D-03, 1E-01 to 1E-02, and 1F-01 to 1F-03; and/or b) a TCR beta chain variable (V_{β}) domain sequence selected from the group consisting of TCR V_{β} domain sequences listed in Tables 1A-01 to 1A-05, 1B-01 to 1B-04, 1C-01 to 1C-03, 1D-01 to 1D-03, 1E-01 to 1E-02, and 1F-01 to 1F-03, wherein the binding protein is capable of binding to a SARS-CoV-2 immunodominant peptide-MHC (pMHC) complex, optionally wherein the binding affinity has a K_{d} less than or equal to about 5×10⁻⁴ M.

[0009] In still another aspect, provided herein is a binding protein comprising: a) a TCR alpha chain sequence selected from the group consisting of TCR alpha chain sequences listed in Tables 1A-01 to 1A-05, 1B-01 to 1B-04, 1C-01 to 1C-03, 1D-01 to 1D-03, 1E-01 to 1E-02, and 1F-01 to 1F-03; and/or b) a TCR beta chain sequence selected from the group consisting of TCR beta chain sequences listed in Tables 1A-01 to 1A-05, 1B-01 to 1B-04, 1C-01 to 1C-03, 1D-01 to 1D-03, 1E-01 to 1E-02, and 1F-01 to 1F-03, wherein the binding protein is capable of binding to a SARS-CoV-2 immunodominant peptide-MHC (pMHC) complex, optionally wherein the binding affinity has a K_{d} less than or equal to about 5×10⁻⁴ M.

[0010] Numerous embodiments are further provided that may be applied to any aspect of the present invention and/or combined with any other embodiment described herein. For example, in one embodiment, 1) the TCR alpha chain CDR, TCR V_{α} domain, and/or TCR alpha chain is encoded by a TRAV, TRAJ, and/or TRAC gene or fragment thereof selected from the group of TRAV, TRAJ, and TRAC genes listed in Tables 1A-01 to 1A-05, 1B-01 to 1B-04, 1C-01 to 1C-03, 1D-01 to 1D-03, 1E-01 to 1E-02, and 1F-01 to 1F-03, and/or 2) the TCR beta chain CDR, TCR V_{β} domain, and/or TCR beta chain is encoded by a TRBV, TRBJ, and/or TRBC gene or fragment thereof selected from the group of TRBV, TRBJ, and TRBC genes listed in Tables 1A-01 to 1A-05, 1B-01 to 1B-04, 1C-01 to 1C-03, 1D-01 to 1D-03, 1E-01 to 1E-02, and 1F-01 to 1F-03, and/or 3) each CDR of the binding protein has up to five amino acid substitutions, insertions, deletions, or a combination thereof as compared to the cognate reference CDR sequence listed in Tables 1A-01 to 1A-05, 1B-01 to 1B-04, 1C-01 to 1C-03, 1D-01 to 1D-03, 1E-01 to 1E-02, and 1F-01 to 1F-03. In another embodiment, the SARS-CoV-2 immunodominant peptide is selected from the group consisting of the sequence listed in Table 2. In still another embodiment, the binding protein is chimeric, humanized, or human. In yet another embodiment, the binding protein is a TCR, an antigen-binding fragment of a TCR, a single chain TCR (scTCR), a chimeric antigen receptor (CAR), or a fusion protein comprising a TCR and an effector domain, optionally wherein the binding domain comprises a transmembrane domain and an effector domain that is intracellular. In another embodiment, the TCR alpha chain and the TCR beta chain are covalently linked, optionally wherein the TCR alpha chain and the TCR beta chain are covalently linked through a linker peptide. In still another embodiment, the TCR alpha chain and/or the TCR beta chain are covalently linked to a moiety, optionally wherein the covalently linked moiety comprises an affinity tag or a label. In yet another embodiment, the affinity tag is selected from the group consisting of Glutathione-S-Transferase (GST), calmodulin binding protein (CBP), protein C tag, Myc tag, HaloTag, HA tag, Flag tag, His tag, biotin tag, and V5 tag, and/or wherein the label is a fluorescent protein. In another embodiment, the covalently linked moiety is selected from the group consisting of an inflammatory agent, cytokine, toxin, cytotoxic molecule, radioactive isotope, or antibody or antigen-binding fragment thereof. In still another embodiment, the binding protein binds to the pMHC complex on a cell surface. In yet another embodiment, the MHC is a MHC multimer, optionally wherein the MHC multimer is a tetramer. In another embodiment, the MHC is a MHC class I molecule. In still another embodiment, the MHC comprises an MHC alpha chain that is an HLA serotype selected from the group consisting of HLA-A*02, HLA-A*03, HLA-A*01, HLA-A*11, HLA-A*24, and/or HLA-B*07. In yet another embodiment, the HLA allele is selected from the group consisting of HLA-A*0201, HLA-A*0202, HLA-A*0203, HLA-A*0204, HLA-A*0205, HLA-A*0206, HLA-A*0207, HLA-A*0210, HLA-A*0211, HLA-A*0212, HLA-A*0213, HLA-A*0214, HLA-A*0216, HLA-A*0217, HLA-A*0219, HLA-A*0220, HLA-A*0222, HLA-A*0224, HLA-A*0230, HLA-A*0242, HLA-A*0253, HLA-A*0260, and HLA-A*0274 allele. In another embodiment, binding of the binding protein to the peptide-MHC (pMHC) complex elicits an immune response, optionally wherein the immune response is a T cell response. In still another embodiment, the T cell response is selected from the group consisting of T cell expansion, cytokine release, and/or cytotoxic killing and/or wherein the binding protein is capable of specifically binding to the SARS-CoV-2 immunodominant peptide-MHC (pMHC) complex with a K_{d} less than or equal to about 5×10⁻⁴ M, less than or equal to about 1×10⁻⁴ M, less than or equal to about 5×10⁻⁵ M, less than or equal to about 1×10⁻⁵ M, less than or equal to about 5×10⁻⁶ M, less than or equal to about 1×10⁻⁶ M, less than or equal to about 5×10⁻⁷ M, less than or equal to about 1×10⁻⁷ M, less than or equal to about 5×10⁻⁸ M, less than or equal to about 1×10⁻⁸ M, less than or equal to about 5×10⁻⁹ M, less than or equal to about 1×10⁻⁹ M, less than or equal to about 5×10⁻¹⁰ M, less than or equal to about 1×10⁻¹⁰ M, less than or equal to about 5×10⁻¹¹ M, less than or equal to about 1×10⁻¹¹ M, less than or equal to about 5×10⁻¹² M, less than or equal to about 1×10⁻¹² M, or any range in between, inclusive, such as between about 1-50 micromolar, 1-100 micromolar, 0.1-500 micromolar, and the like.

[0011] In yet another aspect, a TCR alpha chain and/or beta chain selected from the group consisting of TCR alpha chain and beta chain sequences listed in Tables 1A-01 to 1A-05, 1B-01 to 1B-04, 1C-01 to 1C-03, 1D-01 to 1D-03, 1E-01 to 1E-02, and 1F-01 to 1F-03, is provided.

[0012] In another aspect, provided herein is an isolated nucleic acid molecule that hybridizes, under stringent conditions, with the complement of a nucleic acid encoding a polypeptide selected from the group consisting of polypeptide sequences listed in Tables 1A-01 to 1A-05, 1B-01 to 1B-04, 1C-01 to 1C-03, 1D-01 to 1D-03, 1E-01 to 1E-02, and 1F-01 to 1F-03, or a sequence with at least about 80% homology to a nucleic acid encoding a polypeptide selected from the group consisting of the polypeptide sequences listed in Tables 1A-01 to 1A-05, 1B-01 to 1B-04, 1C-01 to 1C-03, 1D-01 to 1D-03, 1E-01 to 1E-02, and 1F-01 to 1F-03, optionally wherein the isolated nucleic acid molecule comprises 1) a TRAV, TRAJ, and/or TRAC gene or fragment thereof selected from the group of TRAV, TRAJ, and TRAC genes listed in Tables 1A-01 to 1A-05, 1B-01 to 1B-04, 1C-01 to 1C-03, 1D-01 to 1D-03, 1E-01 to 1E-02, and 1F-01 to 1F-03 and/or 2) a TRBV, TRBJ, and/or TRBC gene or fragment thereof selected from the group of TRBV, TRBJ, and TRBC genes listed in Tables 1A-01 to 1A-05, 1B-01 to 1B-04, 1C-01 to 1C-03, 1D-01 to 1D-03, 1E-01 to 1E-02, and 1F-01 to 1F-03.

[0013] Numerous embodiments are further provided that may be applied to any aspect of the present invention and/or combined with any other embodiment described herein. For example, in one embodiment, the nucleic acid is codon optimized for expression in a host cell.

[0014] In still another aspect, a vector comprising the isolated nucleic acid described herein is provided.

[0015] Numerous embodiments are further provided that may be applied to any aspect of the present invention and/or combined with any other embodiment described herein. For example, in one embodiment, the vector is a cloning vector, expression vector, or viral vector.

[0016] In yet another aspect, a host cell which comprises the isolated nucleic acid described herein, comprises the vector described herein, and/or expresses the binding protein described herein, optionally wherein the cell is genetically engineered.

[0017] Numerous embodiments are further provided that may be applied to any aspect of the present invention and/or combined with any other embodiment described herein. For example, in one embodiment, the host cell comprises a chromosomal gene knockout of a TCR gene, an HLA gene, or both. In another embodiment, the host cell comprises a knockout of an HLA gene selected from an α1 macroglobulin gene, α2 macroglobulin gene, α3 macroglobulin gene, β1 microglobulin gene, β2 microglobulin gene, and combinations thereof. In still another embodiment, the host cell comprises a knockout of a TCR gene selected from a TCR α variable region gene, TCR β variable region gene, TCR constant region gene, and combinations thereof. In yet another embodiment, the host cell is a hematopoietic progenitor cell, peripheral blood mononuclear cell (PBMC), cord blood cell, or immune cell. In another embodiment, the immune cell is a cytotoxic lymphocyte, cytotoxic lymphocyte precursor cell, cytotoxic lymphocyte progenitor cell, cytotoxic lymphocyte stem cell, CD4⁺ T cell, CD8⁺ T cell, CD4/CD8 double negative T cell, gamma delta (γγ) T cell, natural killer (NK) cell, NK-T cell, dendritic cell, or combination thereof. In still another embodiment, the T cell is a naive T cell, central memory T cell, effector memory T cell, or a combination thereof. In yet another embodiment, the T cell is a primary T cell or a cell of a T cell line. In another embodiment, the T cell does not express or has a lower surface expression of an endogenous TCR In still another embodiment, the host cell is capable of producing a cytokine or a cytotoxic molecule when contacted with a target cell that comprises a peptide-MHC (pMHC) complex comprising a peptide epitope selected from Table 2 in the context of an MHC molecule. In yet another embodiment, the host cell is contacted with the target cell in vitro or in vivo. In another embodiment, the cytokine is TNF-α and/or IFN-γ. In still another embodiment, the cytotoxic molecule is perforins and/or granzymes. In yet another embodiment, the host cell is capable of killing a target cell that comprises a peptide-MHC (pMHC) complex comprising a peptide epitope selected from Table 2 in the context of an MHC molecule. In another embodiment, the MHC molecule is a MHC class I molecule. In still another embodiment, the MHC molecule comprises an MHC alpha chain that is an HLA serotype selected from the group consisting of HLA-A*02, HLA-A*03, HLA-A*01, HLA-A*11, HLA-A*24, and/or HLA-B*07. In yet another embodiment, the HLA allele is selected from the group consisting of HLA-A*02:01. In another embodiment, the target cell is a SARS-CoV-2-infected cell.

[0018] In another aspect, a population of host cells of described herein is provided.

[0019] In still another aspect, a composition comprising: a) a binding protein described herein, b) an isolated nucleic acid described herein, c) a vector described herein, d) a host cell described herein, and/or e) a population of host cells described herein, and a carrier, is provided.

[0020] In yet another aspect, a device or kit comprising: a) a binding protein described herein, b) an isolated nucleic acid described herein, c) a vector described herein, d) a host cell described herein, and/or e) a population of host cells described herein, said device or kit optionally comprising a reagent to detect binding of a), d) and/or e) to a pMHC complex, is provided.

[0021] In another aspect, provided herein is a method of producing a binding protein described herein, wherein the method comprises the steps of: (i) culturing a transformed host cell which has been transformed by a nucleic acid comprising a sequence encoding a binding protein described herein under conditions suitable to allow expression of said binding protein; and (ii) recovering the expressed binding protein.

[0022] In still another aspect, provided herein is a method of producing a host cell expressing a binding protein described herein, wherein the method comprises the steps of: (i) introducing a nucleic acid comprising a sequence encoding a binding protein described herein; (ii) culturing the transformed host cell under conditions suitable to allow expression of said binding protein.

[0023] In yet another aspect, provided herein is a method of detecting the presence or absence of a SARS-CoV-2 antigen comprising a peptide epitope selected from Table 2 and/or SARS-CoV-2 infection, comprising detecting the presence or absence of said SARS-CoV-2 antigen in a sample by use of at least one binding protein described herein, or at least one host cell described herein, wherein detection of the SARS-CoV-2 antigen is indicative of the presence of a SARS-CoV-2 antigen and/or SARS-CoV-2 infection.

[0024] Numerous embodiments are further provided that may be applied to any aspect of the present invention and/or combined with any other embodiment described herein. For example, in one embodiment, the at least one binding protein, or the at least one host cell, forms a complex with a peptide epitope selected from Table 2 in the context of an MHC molecule, and the complex is detected in the form of fluorescence activated cell sorting (FACS), enzyme linked immunosorbent assay (ELISA), radioimmune assay (RIA), immunochemically, Western blot, or intracellular flow assay. In another embodiment, the method further comprises obtaining the sample from a subject. In another embodiment, the method further comprises confirming SARS-CoV-2 infection by detecting SARS-CoV-2 RNA.

[0025] In yet another aspect, provided herein is a method of detecting the level of SARS-CoV-2 infection in a subject, comprising: a) contacting a sample obtained from the subject with at least one binding protein according to any one of claims 1-21, at least one host cell according to claims 27-44, or a population of host cells according to claim 45; and b) detecting the level of reactivity, wherein a higher level of reactivity compared to a control level indicates the level of SARS-CoV-2 infection in the subject.

[0026] Numerous embodiments are further provided that may be applied to any aspect of the present invention and/or combined with any other embodiment described herein. For example, in one embodiment, the control level is a reference number. In another embodiment, the control level is a level of a subject without exposure to SARS-CoV-2.

[0027] In another aspect, provided herein is a method for monitoring the progression of COVID-19 in a subject, the method comprising: a) detecting in a subject sample at a first point in time the level of a SARS-CoV-2 antigen or SARS-CoV-2 infection, according to any one of claims 50-56; b) repeating step a) at a subsequent point in time; and c) comparing the level of a SARS-CoV-2 antigen or SARS-CoV-2 infection detected in steps a) and b) to monitor the progression of COVID-19 in the subject, wherein a reduced level of SARS-CoV-2 antigen or infection detected in step b) compared to step a) indicates an improved progression of COVID-19 in the subject.

[0028] Numerous embodiments are further provided that may be applied to any aspect of the present invention and/or combined with any other embodiment described herein. For example, in one embodiment, between the first point in time and the subsequent point in time, the subject has undergone treatment to treat COVID-19.

[0029] In still another aspect, provided herein is a method for predicting the clinical outcome of a subject afflicted with SARS-CoV-2 infection comprising: a) determining the presence or level of reactivity between a sample obtained from the subject and at least one binding protein according to any one of claims 1-21, at least one host cell according to claims 27-44, or a population of host cells according to claim 45; and b) comparing the presence or level of reactivity to that from a control, wherein the control is obtained from a subject having a good clinical outcome; wherein the presence or a higher level of reactivity in the subject sample as compared to the control indicates that the subject has a good clinical outcome.

[0030] In yet another aspect, provided herein is a method of assessing the efficacy of a SARS-CoV-2 therapy comprising: a) determining the presence or level of reactivity between a sample obtained from the subject and at least one binding protein described herein, at least one host cell described herein, or a population of host cells described herein, in a first sample obtained from the subject prior to providing at least a portion of the SARS-CoV-2 therapy to the subject, and b) determining the presence or level of reactivity between a sample obtained from the subject and at least one binding protein described herein, at least one host cell described herein, or a population of host cells described herein, in a second sample obtained from the subject following provision of the portion of the SARS-CoV-2 therapy, wherein the presence or a higher level of reactivity in the second sample, relative to the first sample, is an indication that the therapy is efficacious for treating SARS-CoV-2 in the subject.

[0031] Numerous embodiments are further provided that may be applied to any aspect of the present invention and/or combined with any other embodiment described herein. For example, in one embodiment, the level of reactivity is indicated by a) the presence of binding and/or b) T cell activation and/or effector function, optionally wherein the T cell activation or effector function is T cell proliferation, killing, or cytokine release. In another embodiment, the T cell binding, activation, and/or effector function is detected using fluorescence activated cell sorting (FACS), enzyme linked immunosorbent assay (ELISA), radioimmune assay (RIA), immunochemically, Western blot, or intracellular flow assay.

[0032] In another aspect, a method of preventing and/or treating SARS-CoV-2 infection in a subject comprising administering to the subject a therapeutically effective amount of a composition comprising cells expressing at least one binding protein described herein, is provided.

[0033] Numerous embodiments are further provided that may be applied to any aspect of the present invention and/or combined with any other embodiment described herein. For example, in one embodiment, the cell is an allogeneic cell, syngeneic cell, or autologous cell. In another embodiment, the cell is genetically modified. In still another embodiment, the cell comprises a chromosomal gene knockout of a TCR gene, an HLA gene, or both a TCR gene and an HLA gene. In yet another embodiment, the cell comprises a knockout of an HLA gene selected from an α1 macroglobulin gene, α2 macroglobulin gene, α3 macroglobulin gene, β1 microglobulin gene, β2 microglobulin gene, and a combination thereof. In another embodiment, the cell comprises a knockout of a TCR gene selected from a TCR α variable region gene, TCR β variable region gene, TCR constant region gene, and combinations thereof. In still another embodiment, the cell is a hematopoietic progenitor cell, peripheral blood mononuclear cell (PBMC), cord blood cell, or immune cell. In yet another embodiment, the immune cell is a cytotoxic lymphocyte, cytotoxic lymphocyte precursor cell, cytotoxic lymphocyte progenitor cell, cytotoxic lymphocyte stem cell, CD4⁺ T cell, CD8⁺ T cell, CD4/CD8 double negative T cell, gamma delta (γδ) T cell, natural killer (NK) cell, NK-T cell, dendritic cell, or combination thereof. In another embodiment, the T cell is a naive T cell, central memory T cell, effector memory T cell, or combination thereof. In still another embodiment, the T cell is a primary T cell or a cell of a T cell line. In yet another embodiment, the T cell does not express or has a lower surface expression of an endogenous TCR In another embodiment, the cell is capable of producing a cytokine or a cytotoxic molecule when contacted with a target cell that comprises a peptide-MHC (pMHC) complex comprising a peptide epitope selected from Table 2 in the context of an MHC molecule. In still another embodiment, the cytokine is TNF-α and/or IFN-γ. In yet another embodiment, the cytotoxic molecule is perforins and/or granzymes. In another embodiment, the host cell is capable of killing a target cell that comprises a peptide-MHC (pMHC) complex comprising a peptide epitope selected from Table 2 in the context of an MHC molecule. In still another embodiment, the MHC molecule is an MHC class I molecule. In yet another embodiment, the MHC molecule comprises an MHC alpha chain that is an HLA serotype selected from the group consisting of HLA-A*02, HLA-A*03, HLA-A*01, HLA-A*11, HLA-A*24, and/or HLA-B*07. In another embodiment, the HLA allele is selected from the group consisting of HLA-A*02:01. In still another embodiment, the target cell is a SARS-CoV-2-infected cell in the subject. In yet another embodiment, the composition further comprises a pharmaceutically acceptable carrier. In another embodiment, the composition induces an immune response against the SARS-CoV-2 in the subject. In still another embodiment, the composition induces an antigen-specific T cell immune response against the SARS-CoV-2 in the subject. In yet another embodiment, the antigen-specific T cell immune response comprises at least one of a CD4⁺ helper T lymphocyte (Th) response and a CD8+ cytotoxic T lymphocyte (CTL) response. In another embodiment, the CTL response is directed against a SARS-CoV-2-infected cell. In still another embodiment, the method further comprising administering at least one additional COVID-19 treatment to the subject. In yet another embodiment, the at least one additional COVID-19 treatment is administered concurrently or sequentially with the composition. In another embodiment, the subject is a mammal, optionally wherein the mammal is a human, a primate, or a rodent.

### BRIEF DESCRIPTION OF THE DRAWINGS

[0034] FIG. 1 shows sample a representative list of exemplary COVID functional epitope targets identified from patients. Sample screen data illustrate the identification of common shared epitopes and epitopes from individual patients. The x-axis shows target enrichment in patient 01-01-001. The y-axis shows target enrichment in patient 01-01-004. The dotted line indicates the enrichment threshold for selecting particularly strong targets.

[0035] FIG. 2A and FIG. 2B show that identified T cell epitopes are shared across multiple patients. FIG. 2A shows an enrichment of target epitope KLWAQCVQL across multiple patients harboring HLA-A*02:01 or HLA-A*03:01 alleles. FIG. 2B shows enrichment of target epitope KTFPPTEPKK across patients. Patients who were hospitalized are highlighted in brown and more severe patients that needed ventilators are shown in red.

[0036] FIG. 3A and FIG. 3B show a summary of identified T cell epitopes. The x-axis shows a representative list of exemplary functional epitopes identified in screens. The y-axis shows a log 2-fold enrichment for each patient.

[0037] FIG. 4A-FIG. 4C show the T-Scan approach for comprehensive mapping of the memory CD8+ T cell response to SARS-CoV-2. FIG. 4A shows an overview of the T-Scan antigen discovery screen. FIG. 4B shows the design of the ORFeome-wide SARS-CoV-2 antigen library. FIG. 4C shows an example SARS-CoV-2 ORFeome-wide screen data for a convalescent COVID19 patient (top panel) and healthy control (bottom panel). Each circle represents a single 61 aa SARS-CoV-2 protein fragment, with the X-axis showing the position of the fragment in the concatenated SARS-CoV-2 ORFeome. The Y-axis shows the performance of the fragment in the screen, calculated as the enrichment of target cells expressing the fragment in the sorted target cells expressing the protein fragment relative to the unsorted library. For the calculation, the ten internal nucleotide barcodes for each fragment were combined and the performance of the four technical screen replicates was averaged using a modified geometric mean. The right panels show the performance of the 60 positive control protein fragments derived from CMV, EBV, and Influenza.

[0038] FIG. 5A-FIG. 5H show results of discovering and validating immunodominant SARS-CoV-2 epitopes presented on HLA-A*02:01. FIG. 5A shows SARS-CoV-2 ORFeome-wide screen data for nine HLA-A*02:01 COVID19 patients. Each circle corresponds to a 20 amino acid (aa) stretch of the SARS-CoV-2 ORFeome, with the X-axis indicating the position of the stretch in the SARS-CoV-2 genome. The Y-axis shows the mean performance of all of the library fragments spanning the given 20 aa stretch, calculated as the enrichment of target cells expressing the fragment in the sorted pool (T-cell recognized) compared to the unsorted library (see FIG. 4C). For the calculation, the ten internal nucleotide barcodes for each fragment were combined and the performance of the four technical screen replicates was averaged using a modified geometric mean. The screen results for nine HLA-A*02:01 patients are marked with different colors. FIG. 5B shows screen data for identified KLW epitope (KLWAQCVQL). The boxplots represent the screen enrichments of all of the fragments in the library that contain the KLW epitope. For this calculation, the ten internal nucleotide barcodes for each fragment were combined and the performance of the four technical screen replicates was averaged using a modified geometric mean. The data for the nine HLA-A*0201 COVID19 patient screens are shown in blue, two healthy control HLA-A*0201 screens shown in grey, and five HLA-A*0301 COVID19 patient screens shown in red. FIG. 5C shows the collapsed screen data for six identified shared epitopes. Each boxplot shows the aggregate enrichment of one epitope in each of the nine screened HLA-A*0201 COVID19 patients (black dots) and two healthy controls (blue dots). The Y-axis shows the mean enrichment of all fragments in the library containing the given epitope, with the ten internal nucleotide barcodes combined and the performance of the four technical screen replicates averaged. Full epitope sequences are listed in Tables 2 and 5. FIG. 5D shows the IFNg ELISA validation of identified epitopes. Memory CD8+ T cells from four HLA-A*02:01 COVID19 patients were incubated with HLA-A*02:01 target cells and 1 uM of each described peptide for 16 hr. The Y-axis shows the concentration of IFNg secreted by T cells from each patient (black dot) in the presence of each peptide compared to a no-peptide control. Data are the means of two technical replicates and representative of two independent experiments. FIG. 5E shows the tetramer staining quantification of memory CD8+ T cells reactive to six shared HLA-A*02:01 epitopes. Memory CD8+ T cells from 27 HLA-A*02:01 COVID19 patients (black dots) and one healthy control (blue dots) were stained using tetramers loaded with each of the six identified epitopes. The Y-axis indicates the percentage of tetramer-positive cells among all CD8+ cells. FIG. 5F shows the correlation of screen performance and cognate T cell frequency as determined by tetramer staining. Each circle indicates the performance of one epitope in one of the nine screened HLA-A*0201 COVID19 patients. The X-axis shows the aggregate performance of the epitope in the T-Scan screen, calculated as the average enrichment of all fragments containing that epitope. The Y-axis shows the frequency of tetramer-positive memory CD8+ T cells recognizing that epitope. FIG. 5G and FIG. 5H show recognition of the three most common HLA-A*02:01 epitopes across COVID19 patients based on screening data (n=9) (FIG. 5G) or tetramer staining (n=27) (FIG. 5H). For FIG. 5G, patients were considered positive for an epitope if the aggregate performance of the epitope in the screen data exceeded a set threshold (mean+2SD of the enrichment of all of the SARS-CoV-2 fragments in the healthy controls). For FIG. 5H, patients were considered positive for an epitope if ≥0.05% of memory CD8+ T cells were positive by tetramer staining. Patients with no detectable reactivity to any of the three epitopes (4/27) are shown outside the Venn diagram.

[0039] FIG. 6A-FIG. 6F show screen data for all validated epitopes. The boxplots represent the screen enrichments of all fragments in the library that contain each described epitope. Samples are colored based on the MHC restriction on which the screen was performed.

[0040] FIG. 7A-FIG. 7F show genome-wide screen hits are enriched for high-affinity MHC binding epitopes. The boxplots represent the predicted MHC binding affinity for each fragment of the library (Entire Library) compared to the predicted MHC binding affinity for the top scoring fragments in each set of screens on a single MHC allele. The MHC binding affinity for each tile was calculated by taking the strongest binder as predicted by NetMHC4.0.

[0041] FIG. 8 shows validation of epitopes using activation-induced surface markers. Peptides identified by the T-Scan screen were validated by measuring the frequency of activated T cells when co-cultured with target cells pulsed with the identified peptide (1 μM). Each plot depicts the correlation of screen performance (X-axis) and the frequency of CD8+, CD137+, and CD69+ T cells (Y-axis) when pulsed with the indicated peptide (color of dots) for the indicated HLA. Each dot represents the mean frequency of activated cells for T cells from an individual patient as a fold change over un-pulsed controls.

[0042] FIG. 9 shows validation of epitopes using IFNγ secretion peptides identified by the T-Scan screen were validated by measuring IFNγ secretion of T cells co-cultured with target cells pulsed with the identified peptide (1 μM). Each plot depicts the correlation of screen performance (X-axis) and the concentration of IFNγ (Y-axis) when pulsed with the indicated peptide (color of dots). Each dot represents the mean fold change of IFNγ concentration over un-pulsed controls for T cells from an individual patient.

[0043] FIG. 10 shows T-Scan screen data for HLA-A*01:01 (n=5), HLA-A*03:01 (n=5), HLA-A*11:01 (n=5), HLA-A*24:02 (n=5), and HLA-B*07:02 (n=5) COVID-19 patients. Each circle corresponds to a 20 aa stretch of the SARS-CoV-2 ORFeome, with the X-axis indicating the position of the stretch in the SARS-CoV-2 genome. The Y-axis shows the mean performance of all library fragments spanning the given 20 aa stretch, calculated as described in FIG. 4C. Results for each patient are marked with different colors.

[0044] FIG. 11A-FIG. 11C show the discovery and validation of immunodominant SARS-CoV-2 epitopes presented on HLA-A*01:01, HLA-A*03:01, HLA-A*11:01, HLA-A*24:02, and HLA-B*07:02. FIG. 11A shows collapsed screen data for shared epitopes identified for each analyzed MHC allele. Each boxplot shows the aggregate enrichment of one epitope in each of the five COVID19 patients (black dots) screened for the listed allele. The Y-axis shows the mean enrichment of all fragments in the library containing the given epitope, with the ten internal nucleotide barcodes combined and the performance of the four technical screen replicates averaged. Full epitope sequences are listed in Tables 2 and 5. FIG. 11B shows IFNg ELISA validation of identified epitopes. Memory CD8⁺ T cells from four COVID19 patients positive for each MHC allele were incubated with MHC-matched target cells and 1 uM of each described peptide for 16 hr. The Y-axis shows the concentration of IFNg secreted by T cells from each patient (black dot) in the presence of each peptide compared to a no-peptide control. Data are the means of two technical replicates and representative of two independent experiments. Validation included some patients that had not been used in the original screening experiments. FIG. 11C shows recognition of the three most common epitopes for each MHC allele across five COVID19 patients. Patients were considered positive for an epitope if the aggregate performance of the epitope in the screen data exceeded a threshold (mean+2SD of the enrichment of all of the SARS-CoV-2 fragments in the healthy controls).

[0045] FIG. 12A-FIG. 12C show the immunodominant epitopes span the SARS-CoV-2 ORFeome and are recognized by TCRs with shared features. FIG. 12A shows a distribution of immunodominant CD8+ T cell epitopes across the SARS-CoV-2 genome. Each bar represents one validated immunodominant epitope, with the X-axis showing its position in the SARS-CoV-2 ORFeome, the color indicating its MHC restriction, and the height of the bar indicating the fraction of MHC-matched patients recognizing the epitope. Patients were considered positive for an epitope if the aggregate performance of the epitope in the screen data exceeded a threshold (mean+2 standard deviations (SD) of the enrichment of all of the SARS-CoV-2 fragments in the healthy controls). For clarity, overlapping epitopes are plotted as adjacent bars. FIG. 12B shows immunodominant CD8+ T-cell epitopes by SARS-CoV-2 ORF. The stacked bar graphs show the number of immunodominant epitopes per ORF, with the colors indicating the MHC restriction of each epitope. The MHC color-coding is the same as shown in FIG. 12A. FIG. 12C shows TCR alpha variable (TRAV) gene usage in tetramer-positive T cells across patients. Height of each box corresponds to the number of T cells within the clonotype. Blue corresponds to conserved TRAV gene for a specific epitope and red corresponds to all other TRAV genes.

[0046] FIG. 13A-FIG. 13C show the minimal cross-reactivity of SARS-CoV-2-reactive memory T cells with other coronaviruses. FIG. 13A shows screen data compared across coronavirus ORFeomes. Each panel shows the collective reactivity to one coronavirus genome (SARS-CoV-2, SARS-CoV-1, OC43, HKU1, NL63, or 229E) detected in the 34 T-Scan screens performed. Each circle corresponds to a 20 aa stretch of the coronavirus ORFeome, with the X-axis indicating the position of the stretch in the ORFeome. The Y-axis shows the mean performance of all of the library fragments spanning the given 20 aa stretch, calculated as the enrichment of target cells expressing the fragment in the sorted pool (T-cell recognized) compared to the unsorted library. For the calculation, the ten internal nucleotide barcodes for each fragment were combined and the performance of the four technical screen replicates was averaged using a modified geometric mean (see methods and FIG. 4C). Results for nine HLA-A*02:01 screens are marked in blue, five HLA-A*03:01 screens are marked in red, five HLA-A*01:01 screens are marked in yellow, five HLA-A*11:01 screens are marked in green, five HLA-A*24:02 screens are marked in cyan, and five HLA-B*07:02 screens are marked in magenta. For visualization, the positions of the conserved ORF1ab, S, M, E, and N proteins was aligned across all ORFeomes. FIG. 13B shows an alignment of the KLW epitope across coronavirus genomes. The alignment shows the region of each coronavirus genome corresponding to the SARS-CoV-2 HLA-A*02:01 KLW epitope. The boxplots show the aggregate screen performance of all of the fragments containing each epitope variant for nine HLA-A*02:01-positive COVID19 patients (black dots) and two HLA-A*02:01-positive healthy controls (blue dots). FIG. 13C shows an alignment of the SPR epitope across coronavirus genomes. The alignment shows the region of each coronavirus genome corresponding to the SARS-CoV-2 HLA-B*07:02 epitope. The boxplots show the aggregate screen performance of all of the fragments containing each epitope variant for five HLA-B*07:02-positive COVID19 patients (black dots).

### DETAILED DESCRIPTION OF THE INVENTION

[0047] The present invention is based, at least in part, on the discovery of binding proteins, including T cell receptors (TCRs), that recognize SARS-CoV-2 antigens (e.g., immunodominant peptides).

[0048] Accordingly, the present invention relates, in part, to the identified binding proteins (e.g., TCRs), host cells expressing binding proteins (e.g., TCRs), compositions comprising binding proteins (e.g., TCRs) and host cells expressing binding proteins (e.g., TCRs), methods of diagnosing, prognosing, and monitoring T cell response to SARS-CoV-2, and methods for preventing and/or treating SARS-CoV-2 infection by administering host cells expressing binding proteins (e.g., TCRs).

### I. Definitions

[0049] For convenience, certain terms employed in the specification, examples, and appended claims are collected here.

[0050] The articles “a” and “an” are used herein to refer to one or to more than one (i.e., to at least one) of the grammatical object of the article. By way of example, “an element” means one element or more than one element.

[0051] The term “administering” means providing a pharmaceutical agent or composition to a subject, and includes, but is not limited to, administering by a medical professional and self-administering. This involves the physical introduction of a composition comprising a therapeutic agent to a subject, using any of the various methods and delivery systems known to those skilled in the art. In some embodiments, routes of administration for binding proteins described herein include intravenous, intraperitoneal, intramuscular, subcutaneous, spinal or other parenteral routes of administration, for example by injection or infusion. The phrase “parenteral administration” as used herein means modes of administration other than enteral and topical administration, usually by injection, and includes, without limitation, intravenous, intraperitoneal, intramuscular, intraarterial, intrathecal, intralymphatic, intralesional, intracapsular, intraorbital, intracardiac, intradermal, transtracheal, subcutaneous, subcuticular, intraarticular, subcapsular, subarachnoid, intraspinal, epidural and intrasternal injection and infusion, as well as in vivo electroporation. Alternatively, a binding protein described herein may be administered via a non-parenteral route, such as a topical, epidermal or mucosal route of administration, for example, intranasally, orally, vaginally, rectally, sublingually or topically. Administering may also be performed, for example, once, a plurality of times, and/or over one or more extended periods.

[0052] As used herein, the term “antigen” refers to any natural or synthetic immunogenic substance, such as a protein, peptide, or hapten. An antigen may be a SARS-CoV-2 viral antigen, or a fragment thereof, against which protective or therapeutic immune responses are desired.

[0053] The term “adjuvant” as used herein refers to substances, which when administered prior, together or after administration of an antigen accelerates, prolong and/or enhances the quality and/or strength of an immune response to the antigen in comparison to the administration of the antigen alone. Adjuvants can increase the magnitude and duration of the immune response induced by vaccination.

[0054] The term “antibody” as used to herein includes whole antibodies and any antigen binding fragments (i.e., “antigen-binding portions”) or single chains thereof. An “antibody” refers, in one embodiment, to a glycoprotein comprising at least two heavy (H) chains and two light (L) chains inter-connected by disulfide bonds, or an antigen binding portion thereof. Each heavy chain is comprised of a heavy chain variable region (abbreviated herein as V_{H}) and a heavy chain constant region. In certain naturally occurring antibodies, the heavy chain constant region is comprised of three domains, CH1, CH2 and CH3. In certain naturally occurring antibodies, each light chain is comprised of a light chain variable region (abbreviated herein as V_{L}) and a light chain constant region. The light chain constant region is comprised of one domain, CL. The V_{H} and V_{L} regions may be further subdivided into regions of hypervariability, termed complementarity determining regions (CDR), interspersed with regions that are more conserved, termed framework regions (FR). Each V_{H} and V_{L} is composed of three CDRs and four FRs, arranged from amino-terminus to carboxy-terminus in the following order: FR1, CDR1, FR2, CDR2, FR3, CDR3, FR4. The variable regions of the heavy and light chains contain a binding domain that interacts with an antigen. The constant regions of the antibodies may mediate the binding of the immunoglobulin to host tissues or factors, including various cells of the immune system (e.g., effector cells) and the first component (Clq) of the classical complement system.

[0055] The term “antigen presenting cell” or “APC” includes professional antigen presenting cells (e.g., B lymphocytes, monocytes, dendritic cells, Langerhans cells), as well as other antigen presenting cells (e.g., keratinocytes, endothelial cells, astrocytes, fibroblasts, and oligodendrocytes).

[0056] The term “antigen-binding portion” of a binding protein, such as a TCR, as used herein, refers to one or more portions of a TCR that retain the ability to bind (e.g., specifically binding) to an antigen (e.g., a SARS-CoV-2 viral antigen). Such portions are, for example, between about 8 and about 1500 amino acids in length, suitably between about 8 and about 745 amino acids in length, suitably about 8 to about 300, for example about 8 to about 200 amino acids, or about 10 to about 50 or 100 amino acids in length. It has been shown that the antigen-binding function of a TCR can be performed by fragments of a full-length TCR Examples of binding portions encompassed within the term “antigen-binding portion” of a TCR, include (i) a Fv fragment consisting of the V_{α} and V_{β} domains of a TCR, (ii) an isolated complementarity determining region (CDR) or (iii) a combination of two or more isolated CDRs which may optionally be joined by a synthetic linker. Furthermore, although V_{α} and V_{β}, are coded by separate genes, they may be joined, using recombinant methods, by a synthetic linker that enables them to be made as a single protein chain in which the V_{α} and V_{β} regions pair to form monovalent molecules (known as single chain TCR (scTCR)). Such single chain TCRs are also intended to be encompassed within the term “antigen-binding portion” of a TCR These TCR fragments can be obtained using conventional techniques known to those with skill in the art, and the fragments are screened for utility in the same manner as are complete binding proteins. Antigen-binding portions may be produced by recombinant DNA techniques, or by enzymatic or chemical cleavage of intact immunoglobulins.

[0057] The terms “complementarity determining region” and “CDR” are synonymous with “hypervariable region” or “HVR” and are known in the art to refer to non-contiguous sequences of amino acids within certain binding proteins, such as TCR variable regions, which confer antigen specificity and/or binding affinity. For TCRs, in general, there are three CDRs in each α-chain variable region (αCDR1, αCDR2, and αCDR3) and three CDRs in each β-chain variable region (βCDR1, βCDR2, and βCDR3). CDR3 is believed to be the main CDR responsible for recognizing processed antigen. CDR1 and CDR2 mainly interact with the MHC.

[0058] The term “body fluid” refers to fluids that are excreted or secreted from the body as well as fluids that are normally not excreted or secreted from the body (e.g., amniotic fluid, aqueous humor, bile, blood and blood plasma, cerebrospinal fluid, cerumen and earwax, cowper's fluid or pre-ejaculatory fluid, chyle, chyme, stool, female ejaculate, interstitial fluid, intracellular fluid, lymph, menses, breast milk, mucus, pleural fluid, pus, saliva, sebum, semen, serum, sweat, synovial fluid, tears, urine, vaginal lubrication, vitreous humor, vomit). In some embodiments, the body fluid comprises immune cells, optionally wherein the immune cells are cytotoxic lymphocytes such as cytotoxic T cells and/or NK cells, CD4+ T cells, and the like.

[0059] The term “coding region” refers to regions of a nucleotide sequence comprising codons that are translated into amino acid residues, whereas the term “non-coding region” refers to regions of a nucleotide sequence that are not translated into amino acids (e.g., 5′ and 3′ untranslated regions).

[0060] The term “complementary” refers to the broad concept of sequence complementarity between regions of two nucleic acid strands or between two regions of the same nucleic acid strand. It is known that an adenine residue of a first nucleic acid region is capable of forming specific hydrogen bonds (“base pairing”) with a residue of a second nucleic acid region which is anti-parallel to the first region if the residue is thymine or uracil. Similarly, it is known that a cytosine residue of a first nucleic acid strand is capable of base pairing with a residue of a second nucleic acid strand which is anti-parallel to the first strand if the residue is guanine. A first region of a nucleic acid is complementary to a second region of the same or a different nucleic acid if, when the two regions are arranged in an antiparallel fashion, at least one nucleotide residue of the first region is capable of base pairing with a residue of the second region. In some embodiments, the first region comprises a first portion and the second region comprises a second portion, whereby, when the first and second portions are arranged in an antiparallel fashion, at least about 50%, and, in other embodiments, at least about 75%, 76%, 77%, 78%, 79%, 80%, 81%, 82%, 83%, 84%, 85%, 86%, 87%, 88%, 89%, 90%, 91%, 92%, 93%, 94%, 95%, 96%, 97%, 98%, 99%, or more, or any range in between, inclusive, such as at least about 80%-100%, of the nucleotide residues of the first portion are capable of base pairing with nucleotide residues in the second portion. In some embodiments, all nucleotide residues of the first portion are capable of base pairing with nucleotide residues in the second portion.

[0061] As used herein, the term “costimulate” with reference to activated immune cells includes the ability of a costimulatory molecule to provide a second, non-activating receptor mediated signal (a “costimulatory signal”) that induces proliferation or effector function. For example, a costimulatory signal may result in cytokine secretion, e.g., in a T cell that has received a T cell-receptor-mediated signal. Immune cells that have received a cell-receptor mediated signal, e.g., via an activating receptor are referred to herein as “activated immune cells.”

[0062] “CD3” is known in the art as a multi-protein complex of six chains (see, Abbas and Lichtman, Cellular and Molecular Immunology (9^{th} Edition) (2018); Janeway et al. (Immunobiology) (9^{th} Edition) (2016)). In mammals, the complex comprises a CD3γ chain, a CD3δ chain, two CD3ε chains, and a homodimer of CD3ζ chains. The CD3γ, CD3δ, and CD3ε chains are related cell surface proteins of the immunoglobulin superfamily containing a single immunoglobulin domain. The transmembrane regions of the CD3γ, CD3δ, and CD3ε chains are negatively charged, which is a characteristic that is believed to allow these chains to associate with positively charged regions or residues of T cell receptor chains. The intracellular tails of the CD3γ, CD3δ, and CD3ε chains each contain a single conserved motif known as an immunoreceptor tyrosine-based activation motif or IT AM, whereas each CD3ζ chain has three ITAMs. Without wishing to be bound by theory, it is believed that the IT AMs are important for the signaling capacity of a TCR complex. CD3 used in accordance with the present invention may be from various animal species, including human, mouse, rat, or other mammals.

[0063] A “component of a TCR complex,” as used herein, refers to a TCR chain (i.e., TCRα, TCRβ, TCRγ or TCRδ), a CD3 chain (i.e., CD3γ, CD3δ, CD3ε or CD3ζ), or a complex formed by two or more TCR chains or CD3 chains (e.g., a complex of TCRα and TCRβ, a complex of TCRγ and TCRδ, a complex of CD3ε and CD3δ, a complex of CD3γ and CD3ε, or a sub-TCR complex of TCRα, TCRβ, CD3γ, CD3δ, and two CD3ε chains).

[0064] “Chimeric antigen receptor” or “CAR” refers to a fusion protein that is engineered to contain two or more amino acid sequences linked together in a way that does not occur naturally or does not occur naturally in a host cell, which fusion protein can function as a receptor when present on a surface of a cell. CARs encompassed by the present invention include an extracellular portion comprising an antigen-binding domain (i.e., obtained or derived from an immunoglobulin or immunoglobulin-like molecule, such as a TCR specific for a SARS-CoV-2 viral antigen, a single chain TCR-derived binding protein, an scFv derived from an antibody, an antigen binding domain derived or obtained from a killer immunoreceptor from an NK cell, and the like) linked to a transmembrane domain and one or more intracellular signaling domains (such as an effector domain, optionally containing co-stimulatory domain(s)) (see, e.g., Sadelain et al. (2013) Cancer Discov. 3:388; see also Harris and Kranz (2016) Trends Pharmacol. Sci. 37: 220; Stone et al. (2014) Cancer Immunol. Immunother. 63:1163).

[0065] As used herein, the term “cytotoxic T lymphocyte (CTL) response” refers to an immune response induced by cytotoxic T cells. CTL responses are mediated primarily by CD8⁺ T cells.

[0066] The term “consisting essentially of” is not equivalent to “comprising” and refers to the specified materials or steps of a claim, or to those that do not materially affect the basic characteristics of a claimed subject matter. For example, a protein domain, region, or module (e.g., a binding domain, hinge region, linker module) or a protein (which may have one or more domains, regions, or modules) “consists essentially of a particular amino acid sequence when the amino acid sequence of a domain, region, module, or protein includes extensions, deletions, mutations, or a combination thereof (e.g., amino acids at the amino- or carboxy-terminus or between domains) that, in combination, contribute to at most 20% (e.g., at most 15%, 10%, 8%, 6%, 5%, 4%, 3%, 2% or 1%) of the length of a domain, region, module, or protein and do not substantially affect (i.e., do not reduce the activity by more than 50%, such as no more than 40%, 30%, 25%, 20%, 15%, 10%, 5%, or 1%) the activity of the domain(s), region(s), module(s), or protein (e.g., the target binding affinity of a binding protein).

[0067] The term “determining a suitable treatment regimen for the subject” is taken to mean the determination of a treatment regimen (i.e., a single therapy or a combination of different therapies that are used for the prevention and/or treatment of the viral infection in the subject) for a subject that is started, modified and/or ended based or essentially based or at least partially based on the results of the analysis according to the present invention. One example is starting an adjuvant therapy after surgery whose purpose is to decrease the risk of recurrence, another would be to modify the dosage of a particular chemotherapy. The determination can, in addition to the results of the analysis according to the present invention, be based on personal characteristics of the subject to be treated. In most cases, the actual determination of the suitable treatment regimen for the subject will be performed by the attending physician or doctor.

[0068] As used herein, a “hematopoietic progenitor cell” is a cell that can be derived from hematopoietic stem cells or fetal tissue and is capable of further differentiation into mature cells types (e.g., immune system cells). Exemplary hematopoietic progenitor cells include those with a CD24^{Lo} Lin− CD117⁺ phenotype or those found in the thymus (referred to as progenitor thymocytes).

[0069] “Homologous” as used herein, refers to nucleotide sequence similarity between two regions of the same nucleic acid strand or between regions of two different nucleic acid strands. When a nucleotide residue position in both regions is occupied by the same nucleotide residue, then the regions are homologous at that position. A first region is homologous to a second region if at least one nucleotide residue position of each region is occupied by the same residue. Homology between two regions is expressed in terms of the proportion of nucleotide residue positions of the two regions that are occupied by the same nucleotide residue. By way of example, a region having the nucleotide sequence 5′-ATTGCC-3′ and a region having the nucleotide sequence 5′-TATGGC-3′ share 50% homology. In some embodiments, the first region comprises a first portion and the second region comprises a second portion, whereby, at least about 50%, and, in other embodiments, at least about 75%, 76%, 77%, 78%, 79%, 80%, 81%, 82%, 83%, 84%, 85%, 86%, 87%, 88%, 89%, 90%, 91%, 92%, 93%, 94%, 95%, 96%, 97%, 98%, 99%, or more, or any range in between, inclusive, such as at least about 80%-100%, of the nucleotide residue positions of each of the portions are occupied by the same nucleotide residue. In some embodiments, all nucleotide residue positions of each of the portions are occupied by the same nucleotide residue.

[0070] The term “immune response” includes T cell mediated and/or B cell mediated immune responses. Exemplary immune responses include T cell responses, e.g., cytokine production and cellular cytotoxicity. In addition, the term immune response includes immune responses that are indirectly effected by T cell activation, e.g., antibody production (humoral responses) and activation of cytokine responsive cells, e.g., macrophages.

[0071] An increased ability to stimulate an immune response or the immune system, can result from an enhanced agonist activity of T cell costimulatory receptors and/or an enhanced antagonist activity of inhibitory receptors. An increased ability to stimulate an immune response or the immune system may be reflected by a fold increase of the EC₅₀ or maximal level of activity in an assay that measures an immune response, e.g., an assay that measures changes in cytokine or chemokine release, cytolytic activity (determined directly on target cells or indirectly via detecting CD107a or granzymes) and proliferation. The ability to stimulate an immune response or the immune system activity may be enhanced by at least 10%, 20%, 30%, 40%, 50%, 60%, 70%, 80%, 90%, 100%, 110%, 120%, 130%, 140%, 150%, 160%, 170%, 180%, 190%, 200%, 250%, 300%, 350%, 400%, 500%, or more.

[0072] The term “immunotherapeutic agent” may include any molecule, peptide, antibody or other agent which can stimulate a host immune system to generate an immune response to a viral infection in the subject Various immunotherapeutic agents are useful in the compositions and methods described herein.

[0073] The term “immune cell” refers to any cell of the immune system that originates from a hematopoietic stem cell in the bone marrow, which gives rise to two major lineages: a myeloid progenitor cell (which give rise to myeloid cells such as monocytes, macrophages, dendritic cells, megakaryocytes and granulocytes); and a lymphoid progenitor cell (which give rise to lymphoid cells such as T cells, B cells and natural killer (NK) cells). Exemplary immune system cells include a CD4⁺ T cell, a CD8⁺ T cell, a CD4 CD8 double negative T cell, a gd T cell, a regulatory T cell, a natural killer cell, and a dendritic cell. Macrophages and dendritic cells may be referred to as “antigen presenting cells” or “APCs,” which are specialized cells that can activate T cells when a major histocompatibility complex (MHC) receptor on the surface of the APC complexed with a peptide interacts with a TCR on the surface of a T cell.

[0074] An “isolated protein” refers to a protein that is substantially free of other proteins, cellular material, separation medium, and culture medium when isolated from cells or produced by recombinant DNA techniques, or chemical precursors or other chemicals when chemically synthesized. An “isolated” or “purified” protein or biologically active portion thereof is substantially free of cellular material or other contaminating proteins from the cell or tissue source from which the binding protein, antibody, polypeptide, peptide or fusion protein is derived, or substantially free from chemical precursors or other chemicals when chemically synthesized. The language “substantially free of cellular material” includes preparations of a biomarker polypeptide or fragment thereof, in which the protein is separated from cellular components of the cells from which it is isolated or recombinantly produced. In one embodiment, the language “substantially free of cellular material” includes preparations of a biomarker protein or fragment thereof, having less than about 30% (by dry weight) of non-biomarker protein (also referred to herein as a “contaminating protein”), or, in some embodiments, less than about 25%, 20%, 15%, 10%, 5%, 1%, or less, or any range in between inclusive, such as less than about 1% to 5%, of non-biomarker protein. When binding protein, antibody, polypeptide, peptide or fusion protein or fragment thereof, e.g., a biologically active fragment thereof, is recombinantly produced, it may be substantially free of culture medium, i.e., culture medium represents less than about 20%, 15%, 10%, 5%, 1%, or less, or any range in between inclusive, such as less than about 1% to 50%, of the volume of the protein preparation.

[0075] As used herein, the term “isotype” refers to the antibody class (e.g., IgM, IgG1, IgG2C, and the like) that is encoded by heavy chain constant region genes.

[0076] As used herein, the term “K_{D}” is intended to refer to the dissociation equilibrium constant of a particular binding protein-antigen interaction. The binding affinity of binding proteins encompassed by the present invention may be measured or determined by standard binding protein-target binding assays, for example, competitive assays, saturation assays, or standard immunoassays, such as ELISA or RIA. A relatively lower Kd value indicates a relatively higher binding affinity (e.g., Kd values of less than or equal to about 5×10⁻⁴ M (500 uM) include a Kd value of 1×10⁻⁴ M (100 uM) and a 100 uM Kd indicates a relatively higher binding affinity as compared to a 500 uM Kd).

[0077] A “kit” is any manufacture (e.g., a package or container) comprising at least one reagent, e.g., a probe or small molecule, for specifically detecting and/or affecting the expression of a marker encompassed by the present invention. The kit may be promoted, distributed, or sold as a unit for performing the methods encompassed by the present invention. The kit may comprise one or more reagents necessary to express a composition useful in the methods encompassed by the present invention. In some embodiments, the kit may further comprise a reference standard, e.g., a nucleic acid encoding a protein that does not affect or regulate signaling pathways controlling cell growth, division, migration, survival or apoptosis. One skilled in the art can envision many such control proteins, including, but not limited to, common molecular tags (e.g., green fluorescent protein and beta-galactosidase), proteins not classified in any of pathway encompassing cell growth, division, migration, survival or apoptosis by GeneOntology reference, or ubiquitous housekeeping proteins. Reagents in the kit may be provided in individual containers or as mixtures of two or more reagents in a single container. In addition, instructional materials which describe the use of the compositions within the kit may be included.

[0078] As used herein, the term “linked” refers to the association of two or more molecules. The linkage may be covalent or non-covalent. The linkage also may be genetic (i.e., recombinantly fused). Such linkages may be achieved using a wide variety of art recognized techniques, such as chemical conjugation and recombinant protein production.

[0079] A “linker,” in some embodiments, may refer to an amino acid sequence that connects two proteins, polypeptides, peptides, domains, regions, or motifs and may provide a spacer function compatible with interaction of the two sub-binding domains so that the resulting polypeptide retains a specific binding affinity (e.g., scTCR) to a target molecule or retains signaling activity (e.g., TCR complex). In some embodiments, a linker is comprised of about two to about 35 amino acids, for instance, or about four to about 20 amino acids or about eight to about 15 amino acids or about 15 to about 25 amino acids.

[0080] “Major histocompatibility complex” (MHC) refers to glycoproteins that deliver peptide antigens to a cell surface. MHC class I molecules are heterodimers having a membrane spanning a chain (with three a domains) and a non-covalently associated b2 microglobulin. MHC class II molecules are composed of two transmembrane glycoproteins, a and b, both of which span the membrane. Each chain has two domains. MHC class I molecules deliver peptides originating in the cytosol to the cell surface, where a peptide antigen-MHC (pMHC) complex is recognized by CD8⁺ T cells. MHC class II molecules deliver peptides originating in the vesicular system to the cell surface, where they are recognized by CD4⁺ T cells. Human MHC is referred to as human leukocyte antigen (HLA).

[0081] The terms “prevent,” “preventing,” “prevention,” “prophylactic treatment,” and the like refer to reducing the probability of developing a disease, disorder, or condition in a subject, who does not have, but is at risk of or susceptible to developing a disease, disorder, or condition.

[0082] The term “prognosis” includes a prediction of the probable course and outcome of a viral infection or the likelihood of recovery from the disease. In some embodiments, the use of statistical algorithms provides a prognosis of a viral infection in an individual. For example, the prognosis may be surgery, development of a clinical subtype of a viral infection, development of one or more clinical factors, or recovery from the disease.

[0083] As used herein, “percent identity” between amino acid sequences is synonymous with “percent homology,” which can be determined using the algorithm of Karlin and Altschul (1990) Proc. Natl. Acad. Sci. USA 87:2264-2268, modified by Karlin and Altschul (1993) Proc. Natl. Acad. Sci. USA 90:5873-5877. The noted algorithm is incorporated into the NBLAST and XBLAST programs of Altschul et al. (1990) J. Mol. Biol. 215:403-410. BLAST nucleotide searches are performed with the NBLAST program, score=100, wordlength=12, to obtain nucleotide sequences homologous to a polynucleotide described herein. BLAST protein searches are performed with the XBLAST program, score=50, wordlength=3, to obtain amino acid sequences homologous to a reference polypeptide. To obtain gapped alignments for comparison purposes, Gapped BLAST is utilized as described in Altschul et al. (1997) Nuc. Acids Res. 25:3389-3402. When utilizing BLAST and Gapped BLAST programs, the default parameters of the respective programs (e.g., XBLAST and NBLAST) may be used.

[0084] The phrase “pharmaceutically-acceptable carrier” means a pharmaceutically-acceptable material, composition or vehicle, such as a liquid or solid filler, diluent, excipient, or solvent encapsulating material, involved in carrying or transporting the subject compound from one organ, or portion of the body, to another organ, or portion of the body.

[0085] The term “recombinant host cell” (or simply “host cell”) refers to a cell that comprises a nucleic acid that is not naturally present in the cell, such as a cell into which a recombinant expression vector has been introduced. It should be understood that cells according to the present invention is intended to refer not only to the particular subject cell, but also encompasses progeny of such a cell. Because certain modifications may occur in succeeding generations due to either mutation or environmental influences, such progeny may not, in fact, be identical to the parent cell, but are still included within the scope of the term cell according to the present invention.

[0086] The term “sample” used for detecting or determining the absence, presence, or level of at least one biomarker is typically brain tissue, cerebrospinal fluid, whole blood, plasma, serum, saliva, urine, stool (e.g., feces), tears, and any other bodily fluid (e.g., as described above under the definition of “body fluids”), or a tissue sample (e.g., biopsy) such as a small intestine, colon sample, or surgical resection tissue. In some embodiments, methods encompassed by the present invention further comprises obtaining the sample from the individual prior to detecting or determining the absence, presence, or level of at least one marker in the sample.

[0087] The term “small molecule” is a term of the art and includes molecules that are less than about 1000 molecular weight or less than about 500 molecular weight. In one embodiment, small molecules do not exclusively comprise peptide bonds. In another embodiment, small molecules are not oligomeric. Exemplary small molecule compounds which may be screened for activity include, but are not limited to, peptides, peptidomimetics, nucleic acids, carbohydrates, small organic molecules (e.g., polyketides) (Cane et al. (1998) Science 282:63-68), and natural product extract libraries. In another embodiment, the compounds are small, organic non-peptidic compounds. In a further embodiment, a small molecule is not biosynthetic.

[0088] The term “specific binding” refers to binding protein binding to a predetermined antigen. Typically, the binding protein binds with an affinity (K_{D}) of approximately less than or equal to about 10⁻⁴ M, such as approximately less than or equal to about 10⁻⁴, less than or equal to about 10⁻⁵, less than or equal to about 10⁻⁶, less than or equal to about 10⁷, less than or equal to about 10⁻⁸, less than or equal to about 10⁻⁹, less than or equal to about 10⁻¹⁰, less than or equal to about 10⁻¹¹, less than or equal to about 10⁻¹², less than or equal to about 10⁻¹³, less than or equal to about 10⁻¹⁴, or even lower, or any range in between, inclusive, such as less than or equal to about 10⁻⁵ to less than or equal to about 10⁻⁷ when determined by a binding assay, such as surface plasmon resonance (SPR) technology in a BIAcore™ assay instrument using an antigen of interest as the analyte and the binding protein as the ligand. In some embodiments, the binding protein binds to the predetermined antigen with an affinity that is at least 1.1-, 1.2-, 1.3-, 1.4-, 1.5-, 1.6-, 1.7-, 1.8-, 1.9-, 2.0-, 2.5-, 3.0-, 3.5-, 4.0-, 4.5-, 5.0-, 6.0-, 7.0-, 8.0-, 9.0-, or 10.0-fold or greater than its affinity for binding to a non-specific antigen (e.g., BSA, casein) other than the predetermined antigen or a closely-related antigen. The phrases “a binding protein recognizing an antigen” and “a binding protein specific for an antigen” are used interchangeably herein with the term “a binding protein which binds specifically to an antigen.” Selective binding is a relative term referring to the ability of a binding protein to discriminate the binding of one antigen over another.

[0089] The term “subject” refers to any healthy animal, mammal or human, or any animal, mammal or human afflicted with a viral infection, e.g., SARS-CoV-2 infection. The term “subject” is interchangeable with “patient.”

[0090] The term “SARS-CoV-2” or “Severe Acute Respiratory Syndrome Coronavirus 2” refers to the causative agent of coronavirus disease 2019 (COVID-19). SARS-CoV-2 was identified as a pandemic by the World Health Organization (WHO) on Mar. 11, 2020. In supporting the process of entry of the virus into the host cell, SARS-CoV2 binds to the ACE2 receiver that is highly expressed in the lower respiratory tract such as type II alveolar cells (AT2) of the lungs, upper esophagus and stratified epithelial cells, and other cells such as absorptive enterocytes from the ileum and colon, cholangiocytes, myocardial cells, kidney proximal tubule cells, and bladder urothelial cells. Therefore, patients who are infected with this virus not only experience respiratory problems such as pneumonia leading to Acute Respiratory Distress Syndrome (ARDS), but also experience disorders of heart, kidneys, and digestive tract.

[0091] There is no specific treatment for eradication of the SARS-CoV2 virus in patients. Therapeutic approaches for another β-coronavirus approach such as SARS-CoV or MERS-CoV treatments may be used. Some of these approaches including lopinavir/ritonavir, chloroquine, and hydroxychloroquine. Aerosol inhalation of interferon α twice per night also could be used. In some cases, combinations of interferon-α combined with ribavirin have commonly used coronaviruses (such as MERS-CoV). It was also found that the combination of interferon with steroid drugs can accelerate lung repair and increase oxygen survival levels. However, inconsistent results have been shown for therapy using interferon alpha.

[0092] SARS-CoV-2 virus is an enveloped, non-segmented, positive sense RNA virus that is included in the sarbecovirus, ortho corona virinae subfamily which is broadly distributed in humans and other mammals. Its diameter is about 65-125 nm, containing single strands of RNA and provided with crown-like spikes on the outer surface. SARS-CoV2 is a novel β-coronavirus after the previously identified SARS-CoV and MERS-CoV which led to pulmonary failure and potentially fatal respiratory tract infection and caused outbreaks mainly in Guandong, China and Saudi Arabia.

[0093] The genome size of the SARS-CoV-2 varies from 29.8 kb to 29.9 kb and its genome structure followed the specific gene characteristics to known CoVs. The 5′ region spanning more than two-thirds of the genome comprises orf1a/b encoding orf1a/b polyproteins, while the remaining 3′ region spanning a third of the genome consists of genes encoding four main structural proteins, including spike (S) glycoprotein, small envelope (E) glycoprotein, membrane (M) glycoprotein, and nucleocapsid (N) protein. Additionally, the SARS-CoV-2 contains 6 accessory proteins, encoded by ORF3a, ORF6, ORF7a, ORF7b, and ORF8 genes (Khailany et al. (2020) Gene Rep. 19:100682).

[0094] The ORF1ab gene is the largest gene segment of the coronavirus and it constitutes two ORF, i.e., ORF1a and ORF1b, to produce two large overlapping polyproteins, pp1a (orf1a polyprotein) and pp1ab (orf1ab polyprotein) by contributing a ribosomal frame shifting event. The polyproteins are supplemented by protease enzymes namely papain-like proteases (PLpro) and a serine type Mpro (chymotrypsin-like protease (3CLpro)) protease that are encoded in nsp3 and nsp 5. Subsequently, cleavage occurs between pp1a and pp1ab into nonstructural proteins (nsps) 1-11 and 1-16, respectively. The nsps play an important role in many processes in viruses and host cells.

[0095] ORF3a is one of the accessory proteins encoded by SARS-CoV-2 genome. Recent studies have showed that the functional domains of SARS-CoV-2 ORF3a protein are linked to virulence, infectivity, ion channel formation, and virus release (Issa et al. (2020) mSystems 5:e00266-e00220).

[0096] The spike or S glycoprotein is a transmembrane protein with a molecular weight of about 150 kDa found in the outer portion of the virus. S protein has an RBD located in the S1 subunit of the virus that facilitates entry of the virus into the host cell by binding to its receptors on the host cell, ACE2. S protein forms homotrimers protruding in the viral surface and facilitates binding of envelope viruses to host cells by attraction with angiotensin-converting enzyme 2 (ACE2) expressed in lower respiratory tract cells. This glycoprotein is cleaved by the host cell furin-like protease into 2 sub units namely S1 and S2. Part S1 is responsible for the determination of the host virus range and cellular tropism with the receptor binding domain make-up while S2 functions to mediate virus fusion in transmitting host cells.

[0097] The nucleocapsid known as N protein is the structural component of CoV localizing in the endoplasmic reticulum-Golgi region that structurally is bound to the nucleic acid material of the virus. Because the protein is bound to RNA, the protein is involved in processes related to the viral genome, the viral replication cycle, and the cellular response of host cells to viral infections. N protein is also heavily phosphorylated and suggested to lead to structural changes enhancing the affinity for viral RNA.

[0098] Another important part of this virus is the membrane or M protein, which is the most structurally structured protein and plays a role in determining the shape of the virus envelope. This protein can bind to all other structural proteins. Binding with M protein helps to stabilize nucleocapsids or N proteins and promotes completion of viral assembly by stabilizing N protein-RNA complex, inside the internal virion.

[0099] The last component is the envelope or E protein which is the smallest protein in the SARS-CoV-2 structure that plays a role in the production and maturation of this virus.

[0100] The genomic information of SARS-CoV-2 is publicly available and can be obtained from, for example, the NCBI Severe acute respiratory syndrome coronavirus 2 database (available on the World Wide Web at ncbi.nlm.nih.gov/sars-cov-2/) and NGDC Genome Warehouse (available at bigd.big.ac.cn/gwh/), together with epidemiological data for the sequenced isolates.

[0101] As used herein, the term “T cell-mediated response” refers to a response mediated by T cells, including effector T cells (e.g., CD8⁺ cells) and helper T cells (e.g., CD4⁺ cells). T cell mediated responses include, for example, T cell cytotoxicity and proliferation.

[0102] A “transcribed polynucleotide” or “nucleotide transcript” is a polynucleotide (e.g., an mRNA, hnRNA, a cDNA, or an analog of such RNA or cDNA) which is complementary to or homologous with all or a portion of a mature mRNA made by transcription of a biomarker nucleic acid and normal post-transcriptional processing (e.g., splicing), if any, of the RNA transcript, and reverse transcription of the RNA transcript.

[0103] A “T cell” is an immune system cell that matures in the thymus and produces T cell receptors (TCRs). T cells may be naive (not exposed to antigen; increased expression of CD62L, CCR7, CD28, CD3, CD 127, and CD45RA, and decreased expression of CD45RO as compared to T_{CM}), memory T Cells™ (antigen-experienced and long-lived), and effector cells (antigen-experienced, cytotoxic). TM may be further divided into subsets of central memory T cells (T_{CM}, increased expression of CD62L, CCR7, CD28, CD127, CD45RO, and CD95, and decreased expression of CD54RA as compared to naive T cells) and effector memory T cells (T_{EM}, decreased expression of CD62L, CCR7, CD28, CD45RA, and increased expression of CD127 as compared to naive T cells or T_{CM}). Effector T cells (T_{E}) refers to antigen-experienced CD8+ cytotoxic T lymphocytes that have decreased expression of CD62L, CCR7, CD28, and are positive for granzyme and perforin as compared to T_{CM}. Other exemplary T cells include regulatory T cells, such as CD4⁺ CD25⁺ (Foxp3⁺) regulatory T cells and Treg17 cells, as well as Tr1, Th3, CD8⁺CD28, and Qa-1 restricted T cells.

[0104] Conventional T cells, also known as Tconv or Teffs, have effector functions (e.g., cytokine secretion, cytotoxic activity, anti-self-recognition, and the like) to increase immune responses by virtue of their expression of one or more T cell receptors. Tcons or Teffs are generally defined as any T cell population that is not a Treg and include, for example, naïve T cells, activated T cells, memory T cells, resting Tcons, or Tcons that have differentiated toward, for example, the Th1 or Th2 lineages. In some embodiments, Teffs are a subset of non-Treg T cells. In some embodiments, Teffs are CD4+ Teffs or CD8+ Teffs, such as CD4+ helper T lymphocytes (e.g., Th0, Th1, Tfh, or Th17) and CD8⁺ cytotoxic T lymphocytes. As described further herein, cytotoxic T cells are CD8⁺ T lymphocytes. “Naïve Tcons” are CD4⁺ T cells that have differentiated in bone marrow, and successfully underwent a positive and negative processes of central selection in a thymus, but have not yet been activated by exposure to an antigen. Naïve Tcons are commonly characterized by surface expression of L-selectin (CD62L), absence of activation markers such as CD25, CD44 or CD69, and absence of memory markers such as CD45RO. Naïve Tcons are therefore believed to be quiescent and non-dividing, requiring interleukin-7 (IL-7) and interleukin-15 (IL-15) for homeostatic survival (see, at least WO 2010/101870). The presence and activity of such cells are undesired in the context of suppressing immune responses. Unlike Tregs, Tcons are not anergic and can proliferate in response to antigen-based T cell receptor activation (Lechler et al. (2001) Philos. Trans. R. Soc. Lond. Biol. Sci. 356:625-637).

[0105] “T effector” (“T_{eff}” or “T_{E}”) cells refers to T cells (e.g., CD4+ and CD8⁺ T cells) with cytolytic activities as well as T helper (Th) cells, which secrete cytokines and activate and direct other immune cells, but does not include regulatory T cells (Treg cells).

[0106] “T cell receptor” or “TCR” refers to an immunoglobulin superfamily member (having a variable binding domain, a constant domain, a transmembrane region, and a short cytoplasmic tail; see, e.g., Janeway et al. (1997) Curr. Biol. Publ. 4:33) that is capable of binding (e.g., specifically binding) to an antigen peptide bound to a MHC receptor. A TCR can be found on the surface of a cell or in soluble form and generally is comprised of a heterodimer having alpha and beta chains (also known as TCRα and TCRβ, respectively), or γ and δ chains (also known as TCRγ and TCRδ, respectively). Like immunoglobulins (e.g., antibodies), the extracellular portion of TCR chains (e.g., α-chain and β-chain) contain two immunoglobulin domains: a variable domain (e.g., α-chain variable domain or V_{α} and β-chain variable domain or V_{β}; typically amino acids 1 to 116 based on Kabat numbering (Kabat et al. (1991) “Sequences of Proteins of Immunological Interest, US Dept. Health and Human Services, Public Health Service National Institutes of Health, 5^{th} ed.) at the N-terminal end, and one constant domain (e.g., α-chain constant domain or C_{α}, typically amino acids 117 to 259 based on Kabat, β-chain constant domain or C_{β}, typically amino acids 117 to 295 based on Kabat) at the C-terminal end and adjacent to the cell membrane. Also like immunoglobulins, the variable domains contain complementary determining regions (“CDRs”, also called hypervariable regions or “HVRs”) separated by framework regions (“FRs”) (see, e.g., Fores et al. (1990) Proc. Natl. Acad Sci. U.S.A. 87:9138; Chothia et al. (1988) EMBO J 7:3745; Lefranc et al. (2003) Dev. Comp. Immunol. 27:55). In some embodiments, a TCR is found on the surface of a T cell (or T lymphocyte) and associates with the CD3 complex. The source of a TCR encompassed by the present invention may be from various animal species, such as a human, mouse, rat, rabbit or other mammal.

[0107] The term “T cell receptor” or “TCR” should be understood to encompass full TCRs as well as antigen-binding portions or antigen-binding fragments thereof. In some embodiments, the TCR is an intact or full-length TCR, including TCRs in the αβ form or γδ form. In some embodiments, the TCR is an antigen-binding portion that is less than a full-length TCR but that binds to a specific peptide bound in an MHC molecule, such as binds to an MHC-peptide complex. In some cases, an antigen-binding portion or fragment of a TCR may contain only a portion of the structural domains of a full-length or intact TCR, but yet is able to bind the peptide epitope, such as MHC-peptide complex, to which the full TCR binds. In some cases, an antigen-binding portion contains the variable domains of a TCR, such as variable α chain and variable β chain of a TCR, sufficient to form a binding site for binding to a specific MHC-peptide complex. Generally, the variable chains of a TCR contain complementarity determining regions (CDRs) involved in recognition of the peptide, MHC and/or MHC-peptide complex.

[0108] Nomenclature established by the International Immunogenetics Information System (IMGT) (see also Scaviner and Lefranc (2000) Exp. Clin. Immunogenet. 17:83-96 and 97-106; Folch and Lefranc (2000) Exp. Clin. Immunogenet, 17:107-114; T Cell Receptor Factsbook”, (2001) LeFranc and LeFranc, Academic Press, ISBN 0-12-441352-8). The IMGT provides unique sequences used to describe a TCR, and sequences described herein may be identified by reference to such unique sequences provided herein. TCR sequences are publicly available at the IMGT database at imgt.org.

[0109] As described above, native alpha/beta heterodimeric TCRs have an alpha chain and a beta chain. Broadly, each chain comprises variable, joining and constant regions, and the beta chain also usually contains a short diversity region between the variable and joining regions, but this diversity region is often considered as part of the joining region. Each variable region comprises three hypervariable CDRs (Complementarity Determining Regions) embedded in a framework sequence. CDR3 is well-known to be the main mediator of antigen recognition. There are several types of alpha chain variable (V_{α}) regions and several types of beta chain variable (VO) regions distinguished by their framework, CDR1 and CDR2 sequences, and by a partly defined CDR3 sequence. The Vα types are referred to in IMGT nomenclature by a unique TRAV number. For example, “TRAV4” defines a TCR V_{α} region having unique framework and CDR1 and CDR2 sequences, and a CDR3 sequence which is partly defined by an amino acid sequence which is preserved from TCR to TCR but which also includes an amino acid sequence which varies from TCR to TCR. Similarly, “TRBV2” defines a TCR Vβ region having unique framework and CDR1 and CDR2 sequences, but with only a partly defined CDR3 sequence. It is known that there are 54 alpha variable genes, of which 44 are functional, and 67 beta variable genes, of which 42 are functional, within the alpha and beta loci, respectively.

[0110] The joining regions of the TCR are similarly defined by the unique IMGT TRAJ and TRBJ nomenclature, and the constant regions by the IMGT TRAC and TRBC nomenclature. The beta chain diversity region is referred to in IMGT nomenclature by the abbreviation TRBD, and, as mentioned, the concatenated TRBD/TRBJ regions are often considered together as the joining region.

[0111] The gene pools that encode the TCR alpha and beta chains are located on different chromosomes and contain separate V, (D), J and C gene segments, which are brought together by rearrangement during T cell development. This leads to a very high diversity of T cell alpha and beta chains due to the large number of potential recombination events that occur between the 54 TCR alpha variable genes and 61 alpha J genes or between the 67 beta variable genes, two beta D genes and 13 beta J genes. The recombination process is not precise and introduces further diversity within the CDR3 region. Each alpha and beta variable gene may also comprise allelic variants, designated in IMGT nomenclature as TRAVxx*01 and *02, or TRBVx-x*01 and *02 respectively, thus further increasing the amount of variation. In the same way, some of the TRBJ sequences have two known variations. (Note that the absence of a “*” qualifier means that only one allele is known for the relevant sequence). The natural repertoire of human TCRs resulting from recombination and thymic selection has been estimated to comprise approximately 10⁶ unique beta chain sequences, determined from CDR3 diversity (Arstila et al. (1999) Science 286:958-961) and could be even higher (Robins et al. (2009) Blood 114:4099-4107). Each beta chain is estimated to pair with at least 25 different alpha chains, thus generating further diversity (Arstila et al. (1999) Science 286:958-961).

[0112] The term “TCR alpha variable domain” therefore refers to the concatenation of TRAV and TRAJ regions; a TRAV region only; or TRAV and a partial TRAJ region, and the term TCR alpha constant domain refers to the extracellular TRAC region, or to a C-terminal truncated or full length TRAC sequence. Likewise the term “TCR beta variable domain” refers to the concatenation of TRBV and TRBD/TRBJ regions; to the TRBV and TRBD regions only; to the TRBV and TRBJ regions only; or to the TRBV and partial TRBD and/or TRBJ regions, and the term TCR beta constant domain refers to the extracellular TRBC region, or to a C-terminal truncated or full length TRBC sequence.

[0113] These TCR alpha variable domain and TCR beta variable domain nomenclature similarly applies to the variable domains of TCR gamma and TCR delta chains, respectively, for gamma/delta TCRs. An ordinarily skilled artisan can obtain TRAV, TRAJ, TRAC, TRBV, TRBJ, and TRBC gene sequences, such as through the publicly available IMGT database.

[0114] The term “TCR complex” refers to a complex formed by the association of CD3 with TCR For example, a TCR complex may be composed of a CD3γ chain, a CD36 chain, two CD3ε chains, a homodimer of CD3ζ chains, a TCRα chain, and a TCRβ chain. Alternatively, a TCR complex may be composed of a CD3γ chain, a CD3δ chain, two CD3ε chains, a homodimer of CD3ζ chains, a TCRγ chain, and a TCRδ chain.

[0115] The term “therapeutic effect” refers to a local or systemic effect in animals, particularly mammals, and more particularly humans, caused by a pharmacologically active substance. The term thus means any substance intended for use in the diagnosis, cure, mitigation, treatment or prevention of disease or in the enhancement of desirable physical or mental development and conditions in an animal or human.

[0116] The terms “therapeutically effective amount” and “effective amount” means that amount of a substance that produces some desired effect, such as a desired local or systemic therapeutic effect, in at least a sub-population of cells in an animal at a reasonable benefit/risk ratio applicable to any treatment. In some embodiments, a therapeutically effective amount of a substance will depend on the substance's therapeutic index, solubility, pharmacokinetics, half-life, and the like. Toxicity and therapeutic efficacy of subject compounds may be determined by standard pharmaceutical procedures in cell cultures or experimental animals, e.g., for determining the LD₅₀ and the ED₅₀. In some embodiments, compositions that exhibit large therapeutic indices are used. In some embodiments, the LD₅₀ (lethal dosage) may be measured and may be, for example, at least 10%, 20%, 30%, 40%, 50%, 60%, 70%, 80%, 90%, 100%, 200%, 300%, 400%, 500%, 600%, 700%, 800%, 900%, 1000% or more reduced for the agent relative to no administration of the agent. Similarly, the ED₅₀ (i.e., the concentration which achieves a half-maximal inhibition of symptoms) may be measured and may be, for example, at least 10%, 20%, 30%, 40%, 50%, 60%, 70%, 80%, 90%, 100%, 200%, 300%, 400%, 500%, 600%, 700%, 800%, 900%, 1000% or more increased for the agent relative to no administration of the agent. Also, similarly, the IC₅₀ may be measured and may be, for example, at least 10%, 20%, 30%, 40%, 50%, 60%, 70%, 80%, 90%, 100%, 200%, 300%, 400%, 500%, 600%, 700%, 800%, 900%, 1000% or more increased for the agent relative to no administration of the agent. In some embodiments, T cell immune response in an assay may be increased by at least about 10%, 15%, 20%, 25%, 30%, 35%, 40%, 45%, 50%, 55%, 60%, 65%, 70%, 75%, 80%, 85%, 90%, 95%, or even 100%. In another embodiment, at least about a 10%, 15%, 20%, 25%, 30%, 35%, 40%, 45%, 50%, 55%, 60%, 65%, 70%, 75%, 80%, 85%, 90%, 95%, or even 100% decrease in a viral load may be achieved.

[0117] “Treating” a disease in a subject or “treating” a subject having a disease refers to subjecting the subject to a pharmaceutical treatment, e.g., the administration of a drug, such that at least one symptom of the disease is decreased or prevented from worsening.

[0118] The term “variable region” or “variable domain” refers to the domain of an immunoglobulin superfamily binding protein (e.g., a TCR α-chain or β-chain (or γ chain and δ chain for γδ TCRs)) that is involved in binding of the immunoglobulin superfamily binding protein (e.g., TCR) to antigen. The variable domains of the α-chain and β-chain (V_{α} and V_{β}, respectively) of a native TCR generally have similar structures, with each domain comprising four conserved framework regions (FRs) and three CDRs. The V_{α} domain is encoded by two separate DNA segments, the variable gene segment and the joining gene segment (V-J); the V_{β} domain is encoded by three separate DNA segments, the variable gene segment, the diversity gene segment, and the joining gene segment (V-D-J). A single V_{α} or V_{β} domain may be sufficient to confer antigen-binding specificity. Furthermore, TCRs that bind a particular antigen may be isolated using a V_{α} or V_{β} domain from a TCR that binds the antigen to screen a library of complementary V_{α} or V_{β} domains, respectively.

[0119] The term “vector” refers to a nucleic acid molecule capable of transporting another nucleic acid to which it has been linked. In some embodiments, a vector is an episome, i.e., a nucleic acid capable of extra-chromosomal replication. In some embodiments, vectors are those capable of autonomous replication and/or expression of nucleic acids to which they are linked. Vectors capable of directing the expression of genes to which they are operatively linked are referred to herein as “expression vectors”. In general, expression vectors of utility in recombinant DNA techniques are often in the form of “plasmids” which refer generally to circular double stranded DNA loops, which, in their vector form are not bound to the chromosome. In the present specification, “plasmid” and “vector” are used interchangeably as the plasmid is the most commonly used form of vector. However, as will be appreciated by those skilled in the art, the present invention is intended to include such other forms of expression vectors that serve equivalent functions and which become subsequently known in the art.

[0120] There is a known and definite correspondence between the amino acid sequence of a particular protein and the nucleotide sequences that can code for the protein, as defined by the genetic code (shown below). Likewise, there is a known and definite correspondence between the nucleotide sequence of a particular nucleic acid and the amino acid sequence encoded by that nucleic acid, as defined by the genetic code.

### Genetic Code

| | |
|---|---|
| Alanine (Ala, A) | GCA, GCC, GCG, GCT |
| Arginine (Arg, R) | AGA, ACG, CGA, CGC, CGG, CGT |
| Asparagine (Asn, N) | AAC, AAT |
| Aspartic acid (Asp, D) | GAC, GAT |
| Cysteine (Cys, C) | TGC, TGT |
| Glutamic acid (Glu, E) | GAA, GAG |
| Glutamine (Gln, Q) | CAA, CAG |
| Glycine (Gly, G) | GGA, GGC, GGG, GGT |
| Histidine (His, H) | CAC, CAT |
| Isoleucine (Ile, I) | ATA, ATC, ATT |
| Leucine (Leu, L) | CTA, CTC, CTG, CTT, TTA, TTG |
| Lysine (Lys, K) | AAA, AAG |
| Methionine (Met, M) | ATG |
| Phenylalanine (Phe, F) | TTC, TTT |
| Proline (Pro, P) | CCA, CCC, CCG, CCT |
| Serine (Ser, S) | AGC, AGT, TCA, TCC, TCG, TCT |
| Threonine (Thr, T) | ACA, ACC, ACG, ACT |
| Tryptophan (Trp, W) | TGG |
| Tyrosine (Tyr, Y) | TAC, TAT |
| Valine (Val, V) | GTA, GTC, GTG, GTT |
| Termination signal (end) | TAA, TAG, TGA |

[0122] An important and well-known feature of the genetic code is its redundancy, whereby, for most of the amino acids used to make proteins, more than one coding nucleotide triplet may be employed (illustrated above). Therefore, a number of different nucleotide sequences may code for a given amino acid sequence. Such nucleotide sequences are considered functionally equivalent since they result in the production of the same amino acid sequence in all organisms (although certain organisms may translate some sequences more efficiently than they do others). Moreover, occasionally, a methylated variant of a purine or pyrimidine may be found in a given nucleotide sequence. Such methylations do not affect the coding relationship between the trinucleotide codon and the corresponding amino acid.

[0123] In view of the foregoing, the nucleotide sequence of a DNA or RNA encoding a biomarker nucleic acid (or any portion thereof) may be used to derive the polypeptide amino acid sequence, using the genetic code to translate the DNA or RNA into an amino acid sequence. Likewise, for polypeptide amino acid sequence, corresponding nucleotide sequences that can encode the polypeptide can be deduced from the genetic code (which, because of its redundancy, will produce multiple nucleic acid sequences for any given amino acid sequence). Thus, description and/or disclosure herein of a nucleotide sequence which encodes a polypeptide should be considered to also include description and/or disclosure of the amino acid sequence encoded by the nucleotide sequence. Similarly, description and/or disclosure of a polypeptide amino acid sequence herein should be considered to also include description and/or disclosure of all possible nucleotide sequences that can encode the amino acid sequence.

### II. Binding Proteins

[0124] In an aspect encompassed by the present invention, provided herein are binding proteins that bind (e.g., specifically bind) to a peptide-MHC (pMHC) complex comprising a peptide epitope selected from Table 2 in the context of an MHC molecule (e.g., a MHC class I molecule). In some embodiments, the binding protein is capable of binding (e.g., specifically binding) to a SARS-CoV-2 immunodominant peptide-MHC (pMHC) complex with a K_{d} less than or equal to about 5×10⁻⁴ M, less than or equal to about 1×10⁻⁴ M, less than or equal to about 5×10⁻⁵ M, less than or equal to about 1×10⁻⁵ M, less than or equal to about 5×10⁻⁶ M, less than or equal to about 1×10⁻⁶ M, less than or equal to about 5×10⁻⁷ M, less than or equal to about 1×10⁻⁷ M, less than or equal to about 5×10⁻⁸ M, less than or equal to about 1×10⁻⁸ M, less than or equal to about 5×10⁻⁹ M, less than or equal to about 1×10⁻⁹ M, less than or equal to about 5×10⁻¹⁰ M, less than or equal to about 1×10⁻¹⁰ M, less than or equal to about 5×10⁻¹¹ M, less than or equal to about 1×10⁻¹¹ M, less than or equal to about 5×10⁻¹² M, less than or equal to about 1×10⁻¹² M, or any range in between, inclusive, such as between about 1-50 micromolar, 1-100 micromolar, 0.1-500 micromolar, and the like. In some embodiments, the MHC molecule comprises an MHC alpha chain that is an HLA serotype selected from the group consisting of HLA-A*02, HLA-A*03, HLA-A*01, HLA-A*11, HLA-A*24, and/or HLA-B*07. In some embodiments, the HLA allele is selected from the group consisting of HLA-A*0201, HLA-A*0202, HLA-A*0203, HLA-A*0204, HLA-A*0205, HLA-A*0206, HLA-A*0207, HLA-A*0210, HLA-A*0211, HLA-A*0212, HLA-A*0213, HLA-A*0214, HLA-A*0216, HLA-A*0217, HLA-A*0219, HLA-A*0220, HLA-A*0222, HLA-A*0224, HLA-A*0230, HLA-A*0242, HLA-A*0253, HLA-A*0260, and HLA-A*0274 allele. In a specific embodiment, the HLA allele is HLA-A*0201. In some embodiments, the binding proteins provided herein are genetically engineered, isolated, and/or purified.

[0125] In some embodiments, the binding proteins provided herein include (e.g., comprise, consist essentially of, or consist of): a) a TCR alpha chain sequence with at least about 80%, 81%, 82%, 83%, 84%, 85%, 86%, 87%, 88%, 89%, 90%, 91%, 92%, 93%, 94%, 95%, 96%, 97%, 98%, 99%, or more identity to a TCR alpha chain sequence selected from the group consisting of the TCR alpha sequences listed in Tables 1A-01 to 1A-05, 1B-01 to 1B-04, 1C-01 to 1C-03, 1D-01 to 1D-03, 1E-01 to 1E-02, and 1F-01 to 1F-03; and/or b) a TCR beta chain sequence with at least about 80%, 81%, 82%, 83%, 84%, 85%, 86%, 87%, 88%, 89%, 90%, 91%, 92%, 93%, 94%, 95%, 96%, 97%, 98%, 99%, or more identity to a TCR beta chain sequence selected from the group consisting of the TCR beta chain sequences listed in Tables 1A-01 to 1A-05, 1B-01 to 1B-04, 1C-01 to 1C-03, 1D-01 to 1D-03, 1E-01 to 1E-02, and 1F-01 to 1F-03.

[0126] In some embodiments, the binding proteins provided herein include (e.g., comprise, consist essentially of, or consist of): a) a TCR alpha chain sequence selected from the group consisting of the TCR alpha chain sequences listed in Tables 1A-01 to 1A-05, 1B-01 to 1B-04, 1C-01 to 1C-03, 1D-01 to 1D-03, 1E-01 to 1E-02, and 1F-01 to 1F-03; and/or b) a TCR beta chain sequence selected from the group consisting of the TCR beta chain sequences listed in Tables 1A-01 to 1A-05, 1B-01 to 1B-04, 1C-01 to 1C-03, 1D-01 to 1D-03, 1E-01 to 1E-02, and 1F-01 to 1F-03.

[0127] In some embodiments, the binding proteins provided herein include (e.g., comprise, consist essentially of, or consist of): a) a TCR alpha chain variable (V_{α}) domain sequence with at least about 80%, 81%, 82%, 83%, 84%, 85%, 86%, 87%, 88%, 89%, 90%, 91%, 92%, 93%, 94%, 95%, 96%, 97%, 98%, 99%, or more identity to a TCR alpha chain variable (V_{α}) domain sequence selected from the group consisting of the TCR V_{α} domain sequences listed in Tables 1A-01 to 1A-05, 1B-01 to 1B-04, 1C-01 to 1C-03, 1D-01 to 1D-03, 1E-01 to 1E-02, and 1F-01 to 1F-03; and/or b) a TCR beta chain variable (V_{β}) domain sequence with at least about 80%, 81%, 82%, 83%, 84%, 85%, 86%, 87%, 88%, 89%, 90%, 91%, 92%, 93%, 94%, 95%, 96%, 97%, 98%, 99%, or more identity to a TCR beta chain variable (V_{β}) domain sequence selected from the group consisting of the TCR V_{β} domain sequences listed in Tables 1A-01 to 1A-05, 1B-01 to 1B-04, 1C-01 to 1C-03, 1D-01 to 1D-03, 1E-01 to 1E-02, and 1F-01 to 1F-03.

[0128] In some embodiments, the binding proteins provided herein include (e.g., comprise, consist essentially of, or consist of): a) a TCR alpha chain variable (V_{α}) domain sequence selected from the group consisting of the TCR V_{α} domain sequences listed in Tables 1A-01 to 1A-05, 1B-01 to 1B-04, 1C-01 to 1C-03, 1D-01 to 1D-03, 1E-01 to 1E-02, and 1F-01 to 1F-03; and/or b) a TCR beta chain variable (V_{β}) domain sequence selected from the group consisting of the TCR V_{β} domain sequences listed in Tables 1A-01 to 1A-05, 1B-01 to 1B-04, 1C-01 to 1C-03, 1D-01 to 1D-03, 1E-01 to 1E-02, and 1F-01 to 1F-03.

[0129] In some embodiments, the binding proteins provided herein include (e.g., comprise, consist essentially of, or consist of at least one (e.g., one, two or three, such as CDR3 alone or in combination with a CDR1 and CDR2)) TCR alpha chain complementarity determining region (CDR) sequence with at least about 80%, 81%, 82%, 83%, 84%, 85%, 86%, 87%, 88%, 89%, 90%, 91%, 92%, 93%, 94%, 95% 96%, 97%, 98%, 99%, or more identity to a TCR alpha chain CDR sequence selected from the group consisting of the TCR alpha chain CDR sequences listed in Tables 1A-01 to 1A-05, 1B-01 to 1B-04, 1C-01 to 1C-03, 1D-01 to 1D-03, 1E-01 to 1E-02, and 1F-01 to 1F-03.

[0130] In some embodiments, the binding proteins provided herein may also include (e.g., comprise, consist essentially of, or consist of at least one (e.g., one, two or three, such as CDR3 alone or in combination with a CDR1 and CDR2)) TCR beta chain complementarity determining region (CDR) sequence with at least about 80%, 81%, 82%, 83%, 84%, 85%, 86%, 87%, 88%, 89%, 90%, 91%, 92%, 93%, 94%, 95% 96%, 97%, 98%, 99%, or more identity to a TCR beta chain CDR sequence selected from the group consisting of the TCR beta chain CDR sequences listed in Tables 1A-01 to 1A-05, 1B-01 to 1B-04, 1C-01 to 1C-03, 1D-01 to 1D-03, 1E-01 to 1E-02, and 1F-01 to 1F-03.

[0131] In some embodiments, the binding proteins provided herein include (e.g., comprise, consist essentially of, or consist of at least one (e.g., one, two or three)) TCR alpha chain complementarity determining region (CDR) listed in Tables 1A-01 to 1A-05, 1B-01 to 1B-04, 1C-01 to 1C-03, 1D-01 to 1D-03, 1E-01 to 1E-02, and 1F-01 to 1F-03.

[0132] In some embodiments, the binding proteins provided herein may also include (e.g., comprise, consist essentially of, or consist of at least one (e.g., one, two or three)) TCR beta chain complementarity determining region (CDR) listed in Tables 1A-01 to 1A-05, 1B-01 to 1B-04, 1C-01 to 1C-03, 1D-01 to 1D-03, 1E-01 to 1E-02, and 1F-01 to 1F-03.

[0133] In some embodiments, the binding proteins provided herein include (e.g., comprise, consist essentially of, or consist of) a TCR alpha chain constant region (C_{α}) sequence with at least about 80%, 81%, 82%, 83%, 84%, 85%, 86%, 87%, 88%, 89%, 90%, 91%, 92%, 93%, 94%, 95%, 96%, 97%, 98%, 99%, or more identity to a TCR C_{α} sequence listed in Tables 1A-01 to 1A-05, 1B-01 to 1B-04, 1C-01 to 1C-03, 1D-01 to 1D-03, 1E-01 to 1E-02, and 1F-01 to 1F-03.

[0134] In some embodiments, the binding proteins provided herein may also include (e.g., comprise, consist essentially of, or consist of) a TCR beta chain constant region (C_{β}) sequence with at least about 80%, 81%, 82%, 83%, 84%, 85%, 86%, 87%, 88%, 89%, 90%, 91%, 92%, 93%, 94%, 95%, 96%, 97%, 98%, 99%, or more identity to a TCR C_{β} sequence listed in Tables 1A-01 to 1A-05, 1B-01 to 1B-04, 1C-01 to 1C-03, 1D-01 to 1D-03, 1E-01 to 1E-02, and 1F-01 to 1F-03.

[0135] In some embodiments, the binding proteins provided herein include (e.g., comprise, consist essentially of, or consist of) a TCR alpha chain constant region (C_{α}) sequence selected from the group consisting of the TCR Cₐ sequences listed in Tables 1A-01 to 1A-05, 1B-01 to 1B-04, 1C-01 to 1C-03, 1D-01 to 1D-03, 1E-01 to 1E-02, and 1F-01 to 1F-03.

[0136] In some embodiments, the binding proteins provided herein may also include (e.g., comprise, consist essentially of, or consist of) a TCR beta chain constant region (C_{β}) sequence selected from the group consisting of the TCR C_{β} sequences listed in Tables 1A-01 to 1A-05, 1B-01 to 1B-04, 1C-01 to 1C-03, 1D-01 to 1D-03, 1E-01 to 1E-02, and 1F-01 to 1F-03.

[0137] In some embodiments, the binding proteins provided herein comprise a constant region that is chimeric, humanized, human, primate, or rodent (e.g., rat or mouse). For example, a human variable region may be chimerized with a murine constant region or a murine variable region may be humanized with a human constant region and/or human framework regions. In some embodiments, the constant regions may be mutated to modify functionality (e.g., introduction of non-naturally occurring cysteine substitutions in opposing residue locations in TCR alpha and beta chains to provide disulfide bonds useful for increasing affinity between the TCR alpha and beta chains). Similarly, mutations may be made in the transmembrane domain of the constant region to modify functionality (e.g., increase hydrophobicity by introducing a non-naturally occurring substitution of a residue with a hydrophobic amino acid).

Lengthy table referenced here
US20230287079A1-20230914-T00001
Please refer to the end of the specification for access instructions.

Lengthy table referenced here
US20230287079A1-20230914-T00002
Please refer to the end of the specification for access instructions.

Lengthy table referenced here
US20230287079A1-20230914-T00003
Please refer to the end of the specification for access instructions.

Lengthy table referenced here
US20230287079A1-20230914-T00004
Please refer to the end of the specification for access instructions.

Lengthy table referenced here
US20230287079A1-20230914-T00005
Please refer to the end of the specification for access instructions.

Lengthy table referenced here
US20230287079A1-20230914-T00006
Please refer to the end of the specification for access instructions.

* Tables providing representative TCR sequences are grouped according to MHC serotype presentation and sub-grouped according to different peptides presented by the MHC serotype and bound by the sub-grouped TCRs. Individual TCRs, such as those representatively exemplified in the tables, are described and claimed, as well as the genus of binding proteins that bind a peptide epitope sequence described herein either alone or in a complex with an MHC, such as those grouped in the tables provided herein. In addition, TRAV, TRAJ, and TRAC genes for each TCR alpha chain described herein, and TRBV, TRBJ, and TRBC genes for each TCR beta chain described herein, are provided. Sequences for each TCR described herein are provided as pairs of cognate alpha chain and beta chains for each named TCR. TCR sequences described herein are annotated. Variable domain sequences are capitalized. Constant domain sequences are in lower case. CDR1, CDR2, and CDR3 sequences are annotated using bold and underlined text. CDR1, CDR2, and CDR3 are shown in standard order of appearance from left (N-terminus) to right (C-terminus). TRAV, TRAJ, and TRAC genes for each TCR alpha chain described herein, and TRBV, TRBJ, and TRBC genes for each TCR beta chain described herein, are annotated according to well-known IMGT nomenclature described herein.
* Included in Tables herein are peptide epitopes, as well as polypeptide molecules comprising an amino acid sequence having at least 80%, 81%, 82%, 83%, 84%, 85%, 86%, 87%, 88%, 89%, 90%, 91%, 92%, 93%, 94%, 95%, 96%, 97%, 98%, 99%, 99.5%, or more identity across their full length with an amino acid sequence of any SEQ ID NO listed in Tables 1A-01 to 1A-05, 1B-01 to 1B-04, 1C-01 to 1C-03, 1D-01 to 1D-03, 1E-01 to 1E-02, and 1F-01 to 1F-03, or a portion thereof. Such polypeptides may have a function of the full-length peptide or polypeptide as described further herein.

[0138] In some embodiments, the binding proteins disclosed herein may comprise a T cell receptor (TCR), an antigen-binding fragment of a TCR, or a chimeric antigen receptor (CAR). In some embodiments, the binding protein disclosed herein may comprise two polypeptide chains, each of which comprises a variable region comprising a CDR3 of a TCR alpha chain and a CDR3 of a TCR beta chain, or a CDR1, CDR2, and CDR3 of both a TCR alpha chain and a TCR beta chain. In some embodiments, a binding protein comprises a single chain TCR (scTCR), which comprises both the TCR V_{α} and TCR V_{β} domains, but only a single TCR constant domain (C_{α} or C_{β}). The term “chimeric antigen receptor” (CAR) refers to a fusion protein that is engineered to contain two or more naturally-occurring amino acid sequences linked together in a way that does not occur naturally or does not occur naturally in a host cell, which fusion protein can function as a receptor when present on a surface of a cell. CARs encompassed by the present invention may include an extracellular portion comprising an antigen-binding domain (i.e., obtained or derived from an immunoglobulin or immunoglobulin-like molecule, such as an antibody or TCR, or an antigen binding domain derived or obtained from a killer immunoreceptor from an NK cell) linked to a transmembrane domain and one or more intracellular signaling domains (optionally containing co-stimulatory domain(s)) (see, e.g., Sadelain et al. (2013) Cancer Discov. 3:388, Harris and Kranz (2016) Trends Pharmacol. Sci. 37:220, and Stone et al. (2014) Cancer Immunol. Immunother. 63:1163).

[0139] In some embodiments, 1) the TCR alpha chain CDR, TCR V_{α} domain, and/or TCR alpha chain is encoded by a TRAV, TRAJ, and/or TRAC gene or fragment thereof selected from the group of TRAV, TRAJ, and TRAC genes listed in Tables 1A-01 to 1A-05, 1B-01 to 1B-04, 1C-01 to 1C-03, 1D-01 to 1D-03, 1E-01 to 1E-02, and 1F-01 to 1F-03, and/or 2) the TCR beta chain CDR, TCR V_{β} domain, and/or TCR beta chain is encoded by a TRBV, TRBJ, and/or TRBC gene or fragment thereof selected from the group of TRBV, TRBJ, and TRBC genes listed in Tables 1A-01 to 1A-05, 1B-01 to 1B-04, 1C-01 to 1C-03, 1D-01 to 1D-03, 1E-01 to 1E-02, and 1F-01 to 1F-03, and/or 3) each CDR of the binding protein has up to five amino acid substitutions, insertions, deletions, or a combination thereof as compared to the cognate reference CDR sequence listed in Tables 1A-01 to 1A-05, 1B-01 to 1B-04, 1C-01 to 1C-03, 1D-01 to 1D-03, 1E-01 to 1E-02, and 1F-01 to 1F-03.

[0140] In some embodiments, the binding proteins (e.g., the TCR, antigen-binding fragment of a TCR, or chimeric antigen receptor (CAR)) disclosed herein is chimeric (e.g., comprises amino acid residues or motifs from more than one donor or species), humanized (e.g., comprises residues from a non-human organism that are altered or substituted so as to reduce the risk of immunogenicity in a human), or human.

[0141] Methods for producing engineered binding proteins, such as TCRs, CARs, and antigen-binding fragments thereof, are well-known in the art (e.g., Bowerman et al. (2009) Mol. Immunol. 5:3000, U.S. Pat. Nos. 6,410,319, 7,446,191, U.S. Pat. Publ. No. 2010/065818; U.S. Pat. No. 8,822,647, PCT Publ. No. WO 2014/031687, U.S. Pat. No. 7,514,537, and Brentjens et al. (2007) Clin. Cancer Res. 73:5426).

[0142] In some embodiments, the binding protein described herein is a TCR, or antigen-binding fragment thereof, expressed on a cell surface, wherein the cell surface-expressed TCR is capable of more efficiently associating with a CD3 protein as compared to endogenous TCR A binding protein encompassed by the present invention, such as a TCR, when expressed on the surface of a cell like a T cell, may also have higher surface expression on the cell as compared to an endogenous binding protein, such as an endogenous TCR In some embodiments, provided herein is a CAR, wherein the binding domain of the CAR comprises an antigen-specific TCR binding domain (see, e.g., Walseng et al. (2017) Scientific Reports 7:10713).

[0143] Also provided are modified binding proteins (e.g., TCRs, antigen-binding fragments of TCRs, or CARs) that may be prepared according to well-known methods using a binding protein having one or more of the V_{α} and/or V_{β} sequences disclosed herein as starting material to engineer a modified binding protein that may have altered properties from the starting binding protein. A binding protein may be engineered by modifying one or more residues within one or both variable regions (i.e., V_{α} and/or V_{β}), for example within one or more CDR regions and/or within one or more framework regions. Additionally or alternatively, a binding protein may be engineered by modifying residues within the constant region(s).

[0144] Another type of variable region modification is to mutate amino acid residues within the V_{α} and/or V_{β} CDR1, CDR2 and/or CDR3 regions to thereby improve one or more binding properties (e.g., affinity) of the binding protein of interest. Site-directed mutagenesis or PCR-mediated mutagenesis may be performed to introduce the mutation(s) and the effect on protein binding, or other functional property of interest, may be evaluated in in vitro or in vivo assays as described herein and provided in the Examples. In some embodiments, conservative modifications (as discussed above) may be introduced. The mutations may be amino acid substitutions, additions or deletions. In some embodiments, the mutations are substitutions. Moreover, typically no more than one, two, three, four or five residues within a CDR region are modified.

[0145] In some embodiments, binding proteins (e.g., TCRs, antigen-binding fragments of TCRs, or CARs) described herein may possess one or more amino acid substitutions, deletions, or additions relative to a naturally occurring TCR In some embodiments, each CDR of the binding protein has up to five amino acid substitutions, insertions, deletions, or a combination thereof as compared to the cognate reference CDR sequence listed in Tables 1A-01 to 1A-05, 1B-01 to 1B-04, 1C-01 to 1C-03, 1D-01 to 1D-03, 1E-01 to 1E-02, and 1F-01 to 1F-03. Conservative substitutions of amino acids are well-known and may occur naturally or may be introduced when the binding protein is recombinantly produced. Amino acid substitutions, deletions, and additions may be introduced into a protein using mutagenesis methods known in the art (see, e.g., Sambrook et al. (2001) Molecular Cloning: A Laboratory Manual, 3d ed., Cold Spring Harbor Laboratory Press, NY). Oligonucleotide-directed site-specific (or segment specific) mutagenesis procedures may be employed to provide an altered polynucleotide that has particular codons altered according to the substitution, deletion, or insertion desired. Alternatively, random or saturation mutagenesis techniques, such as alanine scanning mutagenesis, error prone polymerase chain reaction mutagenesis, and oligonucleotide-directed mutagenesis may be used to prepare immunogen polypeptide variants (see, e.g., Sambrook et al. supra).

[0146] A variety of criteria known to the ordinarily skilled artisan indicate whether an amino acid that is substituted at a particular position in a peptide or polypeptide is conservative (or similar). For example, a similar amino acid or a conservative amino acid substitution is one in which an amino acid residue is replaced with an amino acid residue having a similar side chain. Similar amino acids may be included in the following categories: amino acids with basic side chains (e.g., lysine, arginine, histidine); amino acids with acidic side chains (e.g., aspartic acid, glutamic acid); amino acids with uncharged polar side chains (e.g., glycine, asparagine, glutamine, serine, threonine, tyrosine, cysteine, histidine); amino acids with nonpolar side chains (e.g., alanine, valine, leucine, isoleucine, proline, phenylalanine, methionine, tryptophan); amino acids with beta-branched side chains (e.g., threonine, valine, isoleucine), and amino acids with aromatic side chains (e.g., tyrosine, phenylalanine, tryptophan). Proline, which is considered more difficult to classify, shares properties with amino acids that have aliphatic side chains (e.g., leucine, valine, isoleucine, and alanine). In some embodiments, substitution of glutamine for glutamic acid or asparagine for aspartic acid may be considered a similar substitution in that glutamine and asparagine are amide derivatives of glutamic acid and aspartic acid, respectively. As understood in the art “similarity” between two polypeptides is determined by comparing the amino acid sequence and conserved amino acid substitutes thereto of the polypeptide to the sequence of a second polypeptide (e.g., using GENEWORKS™, Align, the BLAST algorithm, or other algorithms described herein and practiced in the art).

[0147] In any of the embodiments described herein, an encoded binding protein (e.g., TCR, antigen-binding fragment of a TCR, or CAR) may comprise a “signal peptide” (also known as a leader sequence, leader peptide, or transit peptide). Signal peptides target newly synthesized polypeptides to their appropriate location inside or outside the cell. A signal peptide may be removed from the polypeptide during or once localization or secretion is completed. Polypeptides that have a signal peptide are referred to herein as a “pre-protein” and polypeptides having their signal peptide removed are referred to herein as “mature” proteins or polypeptides. In some embodiments, a binding protein (e.g., TCR, antigen-binding fragment of a TCR, or CAR) described herein comprises a mature V domain, a mature V_{β} domain, or both. In some embodiments, a binding protein (e.g., TCR, antigen-binding fragment of a TCR, or CAR) described herein comprises a mature TCR β-chain, a mature TCR α-chain, or both.

[0148] In some embodiments, the binding proteins are fusion proteins comprising: (a) an extracellular component comprising a TCR or antigen-binding fragment thereof, (b) an intracellular component comprising an effector domain or a functional portion thereof, and (c) a transmembrane domain connecting the extracellular and intracellular components. In some embodiments, the fusion protein is capable of binding (e.g., specifically binding) to a peptide-MHC (pMHC) complex comprising a peptide epitope selected from Table 2 in the context of an MHC molecule (e.g., a MHC class I molecule). In some embodiments, the MHC molecule comprises an MHC alpha chain that is an HLA serotype selected from the group consisting of HLA-A*02, HLA-A*03, HLA-A*01, HLA-A*11, HLA-A*24, and/or HLA-B*07. In some embodiments, the HLA allele is selected from the group consisting of HLA-A*0201, HLA-A*0202, HLA-A*0203, HLA-A*0204, HLA-A*0205, HLA-A*0206, HLA-A*0207, HLA-A*0210, HLA-A*0211, HLA-A*0212, HLA-A*0213, HLA-A*0214, HLA-A*0216, HLA-A*0217, HLA-A*0219, HLA-A*0220, HLA-A*0222, HLA-A*0224, HLA-A*0230, HLA-A*0242, HLA-A*0253, HLA-A*0260, and HLA-A*0274 allele. In specific embodiments, the HLA allele is HLA-A*0201.

[0149] As used herein, an “effector domain” or “immune effector domain” is an intracellular portion or domain of a fusion protein or receptor that can directly or indirectly promote an immune response in a cell when receiving an appropriate signal. In some embodiments, an effector domain is from an immune cell protein or portion thereof or immune cell protein complex that receives a signal when bound (e.g., CD3ζ), or when the immune cell protein or portion thereof or immune cell protein complex binds directly to a target molecule and triggers signal transduction from the effector domain in an immune cell.

[0150] An effector domain may directly promote a cellular response when it contains one or more signaling domains or motifs, such as an intracellular tyrosine-based activation motif (ITAM), such as those found in costimulatory molecules. Without wishing to be bound by theory, it is believed that ITAMs are useful for T cell activation following ligand engagement by a T cell receptor or by a fusion protein comprising a T cell effector domain. In some embodiments, the intracellular component or functional portion thereof comprises an ITAM. Exemplary immune effector domains include but are not limited to those from, CD3ε, CD3δ, CD3ζ, CD25, CD79A, CD79B, CARD11, DAP10, FcRα, FcRβ, FcRγ, Fyn, HVEM, ICOS, Lck, LAG3, LAT, LRP, NKG2D, NOTCH1, NOTCH2, NOTCH3, NOTCH4, Wnt, ROR2, Ryk, SLAMF1, Slp76, pTα, TCRα, TCRβ, TRIM, Zap70, PTCH2, or any combination thereof. In some embodiments, an effector domain comprises a lymphocyte receptor signaling domain (e.g., CD3ζ or a functional portion or variant thereof).

[0151] In further embodiments, the intracellular component of the fusion protein comprises a costimulatory domain or a functional portion thereof selected from CD27, CD28, 4-1BB (CD137), OX40 (CD134), CD2, CD5, ICAM-1 (CD54), LFA-1 (CD11a/CD18), ICOS (CD278), GITR, CD30, CD40, BAFF-R, HVEM, LIGHT, MKG2C, SLAMF7, NKp80, CD160, B7-H3, a ligand that binds (e.g., specifically binding) with CD83, or a functional variant thereof, or any combination thereof. In some embodiments, the intracellular component comprises a CD28 costimulatory domain or a functional portion or variant thereof (which may optionally include a LL-GG mutation at positions 186-187 of the native CD28 protein (e.g., Nguyen et al. (2003) Blood 702:4320), a 4-1BB costimulatory domain or a functional portion or variant thereof, or both.

[0152] In some embodiments, an effector domain comprises a CD3ε endodomain or a functional (e.g., signaling) portion thereof, or a functional variant thereof. In further embodiments, an effector domain comprises a CD27 endodomain or a functional (e.g., signaling) portion thereof, or a functional variant thereof. In further embodiments, an effector domain comprises a CD28 endodomain or a functional (e.g., signaling) portion thereof, or a functional variant thereof. In still further embodiments, an effector domain comprises a 4-1BB endodomain or a functional (e.g., signaling) portion thereof, or a functional variant thereof. In further embodiments, an effector domain comprises an OX40 endodomain or a functional (e.g., signaling) portion thereof, or a functional variant thereof. In further embodiments, an effector domain comprises a CD2 endodomain or a functional (e.g., signaling) portion thereof, or a functional variant thereof. In further embodiments, an effector domain comprises a CD5 endodomain or a functional (e.g., signaling) portion thereof, or a functional variant thereof. In further embodiments, an effector domain comprises an ICAM-1 endodomain or a functional (e.g., signaling) portion thereof, or a functional variant thereof. In further embodiments, an effector domain comprises a LFA-1 endodomain or a functional (e.g., signaling) portion thereof, or a functional variant thereof. In further embodiments, an effector domain comprises an ICOS endodomain or a functional (e.g., signaling) portion thereof, or a functional variant thereof.

[0153] An extracellular component and an intracellular component encompassed by the present invention are connected by a transmembrane domain. A “transmembrane domain,” as used herein, is a portion of a transmembrane protein that can insert into or span a cell membrane. Transmembrane domains have a three-dimensional structure that is thermodynamically stable in a cell membrane and generally range in length from about 15 amino acids to about 30 amino acids. The structure of a transmembrane domain may comprise an alpha helix, a beta barrel, a beta sheet, a beta helix, or any combination thereof. In some embodiments, the transmembrane domain comprises or is derived from a known transmembrane protein (e.g., a CD4 transmembrane domain, a CD8 transmembrane domain, a CD27 transmembrane domain, a CD28 transmembrane domain, or any combination thereof).

[0154] In some embodiments, the extracellular component of the fusion protein further comprises a linker disposed between the binding domain and the transmembrane domain. As used herein when referring to a component of a fusion protein that connects the binding and transmembrane domains, a “linker” may be an amino acid sequence having from about two amino acids to about 500 amino acids, which can provide flexibility and room for conformational movement between two regions, domains, motifs, fragments, or modules connected by the linker. For example, a linker encompassed by the present invention can position the binding domain away from the surface of a host cell expressing the fusion protein to enable proper contact between the host cell and a target cell, antigen binding, and activation (Patel et al. (1999) Gene Therapy 6:412-419). Linker length may be varied to maximize antigen recognition based on the selected target molecule, selected binding epitope, or antigen binding domain seize and affinity (see, e.g., Guest et al. (2005) Immunother. 28:203-11 and PCT Publ. No. WO 2014/031687). Exemplary linkers include those having a glycine-serine amino acid chain having from one to about ten repeats of GlyₓSer_{y}, wherein x and y are each independently an integer from 0 to 10, provided that x and y are not both 0 (e.g., (Gly₄Ser)₂, (Gly₃Ser)₂, Gly₂Ser, or a combination thereof, such as ((Gly₃Ser)₂Gly₂Ser)).

[0155] Binding proteins encompassed by the present invention may, in some embodiments, be covalently linked to a moiety. In some embodiments, the covalently linked moiety comprises an affinity tag or a label. The affinity tag may be selected from the group consisting of Glutathione-S-Transferase (GST), calmodulin binding protein (CBP), protein C tag, Myc tag, HaloTag, HA tag, Flag tag, His tag, biotin tag, and V5 tag. The label may be a fluorescent protein. In some embodiments, the covalently linked moiety is selected from the group consisting of an inflammatory agent, an anti-inflammatory agent, a cytokine, a toxin, a cytotoxic molecule, a radioactive isotope, or an antibody such as a single-chain Fv.

[0156] A binding protein may be conjugated to an agent used in imaging, research, therapeutics, theranostics, pharmaceuticals, chemotherapy, chelation therapy, targeted drug delivery, and radiotherapy. In some embodiments, a binding protein may be conjugated to or fused with detectable agents, such as a fluorophore, a near-infrared dye, a contrast agent, a nanoparticle, a metal-containing nanoparticle, a metal chelate, an X-ray contrast agent, a PET agent, a metal, a radioisotope, a dye, radionuclide chelator, or another suitable material that can be used in imaging. In some embodiments, 1, 2, 3, 4, 5, 6, 7, 8, 9, 10, or more detectable moieties may be linked to a binding protein. Non-limiting examples of radioisotopes include alpha emitters, beta emitters, positron emitters, and gamma emitters. In some embodiments, the metal or radioisotope is selected from the group consisting of actinium, americium, bismuth, cadmium, cesium, cobalt, europium, gadolinium, iridium, lead, lutetium, manganese, palladium, polonium, radium, ruthenium, samarium, strontium, technetium, thallium, and yttrium. In some embodiments, the metal is actinium, bismuth, lead, radium, strontium, samarium, or yttrium. In some embodiments, the radioisotope is actinium-225 or lead-212. In some embodiments, the near-infrared dyes are not easily quenched by biological tissues and fluids. In some embodiments, the fluorophore is a fluorescent agent emitting electromagnetic radiation at a wavelength between 650 nm and 4000 nm, such emissions being used to detect such agent Non-limiting examples of fluorescent dyes that may be used as a conjugating molecule include DyLight-680, DyLight-750, VivoTag-750, DyLight-800, IRDye-800, VivoTag-680, Cy5.5, ZQ800, or indocyanine green (ICG). In some embodiments, near infrared dyes often include cyanine dyes (e.g., Cy7, Cy5.5, and Cy5). Additional, non-limiting examples of fluorescent dyes for use as a conjugating molecule in accordance with present invention include acradine orange or yellow, Alexa Fluors® (e.g., Alexa Fluor® 790, 750, 700, 680, 660, and 647) and any derivative thereof, 7-actinomycin D, 8-anilinonaphthalene-1-sulfonic acid, ATTO® dye and any derivative thereof, auramine-rhodamine stain and any derivative thereof, bensantrhone, bimane, 9-10-bis(phenylethynyl)anthracene, 5,12-bis(phenylethynyl)naththacene, bisbenzimide, brainbow, calcein, carbodyfluorescein and any derivative thereof, 1-chloro-9,10-bis(phenylethynyl)anthracene and any derivative thereof, DAPI, DiOC6, DyLight® Fluors® and any derivative thereof, epicocconone, ethidium bromide, FlAsH-EDT2®, Fluo dye and any derivative thereof, FluoProbe® and any derivative thereof, fluorescein and any derivative thereof, Fura® and any derivative thereof, GelGreen® and any derivative thereof, GelRed® and any derivative thereof, fluorescent proteins and any derivative thereof, m isoform proteins and any derivative thereof such as for example mCherry, hetamethine dye and any derivative thereof, hoeschst stain, iminocoumarin, indian yellow, indo-1 and any derivative thereof, laurdan, lucifer yellow and any derivative thereof, luciferin and any derivative thereof, luciferase and any derivative thereof, mercocyanine and any derivative thereof, nile dyes and any derivative thereof, perylene, phloxine, phyco dye and any derivative thereof, propium iodide, pyranine, rhodamine and any derivative thereof, ribogreen, RoGFP, rubrene, stilbene and any derivative thereof, sulforhodamine and any derivative thereof, SYBR and any derivative thereof, synapto-pHluorin, tetraphenyl butadiene, tetrasodium tris, Texas Red, Titan Yellow, TSQ, umbelliferone, violanthrone, yellow fluorescent protein and YOYO-1. Other suitable fluorescent dyes include, but are not limited to, fluorescein and fluorescein dyes (e.g., fluorescein isothiocyanine or FITC, naphthofluorescein, 4′, 5′-dichloro-2′,7′-dimethoxyfluorescein, 6-carboxyfluorescein or FAM, etc.), carbocyanine, merocyanine, styryl dyes, oxonol dyes, phycoerythrin, erythrosin, eosin, rhodamine dyes (e.g., carboxytetramethyl-rhodamine or TAMRA, carboxyrhodamine 6G, carboxy-X-rhodamine (ROX), lissamine rhodamine B, rhodamine 6G, rhodamine Green, rhodamine Red, tetramethylrhodamine (TMR), etc.), coumarin and coumarin dyes (e.g., methoxycoumarin, dialkylaminocoumarin, hydroxycoumarin, aminomethylcoumarin (AMCA), etc.), Oregon Green™ dyes (e.g., Oregon Green™ 488, 500, 514., etc.), Texas Red®, Texas Red®-X, SPECTRUM RED®, SPECTRUM GREEN®, cyanine dyes (e.g., CY-3, Cy-5, CY-3.5, CY-5.5, etc.), Alexa Fluor® dyes (e.g., Alexa Fluor® 350, 488, 532, 546, 568, 594, 633, 660, 680, etc.), BODIPY® dyes (e.g., BODIPY® FL, R6G, TMR, TR, 530/550, 558/568, 564/570, 576/589, 581/591, 630/650, 650/665, etc.), IRD dyes (e.g., IRD40™, IRD700™ IRD800™, etc.), and the like. Additional suitable detectable agents are well-known in the art (e.g., PCT Publ. No. PCT/US14/56177). Non-limiting examples of radioisotopes include alpha emitters, beta emitters, positron emitters, and gamma emitters. In some embodiments, the metal or radioisotope is selected from the group consisting of actinium, americium, bismuth, cadmium, cesium, cobalt, europium, gadolinium, iridium, lead, lutetium, manganese, palladium, polonium, radium, ruthenium, samarium, strontium, technetium, thallium, and yttrium. In some embodiments, the metal is actinium, bismuth, lead, radium, strontium, samarium, or yttrium. In some embodiments, the radioisotope is actinium-225 or lead-212.

[0157] Binding proteins may be conjugated to a radiosensitizer or photosensitizer. Examples of radiosensitizers include but are not limited to: ABT-263, ABT-199, WEHI-539, paclitaxel, carboplatin, cisplatin, oxaliplatin, gemcitabine, etanidazole, misonidazole, tirapazamine, and nucleic acid base derivatives (e.g., halogenated purines or pyrimidines, such as 5-fluorodeoxyuridine). Examples of photosensitizers include but are not limited to: fluorescent molecules or beads that generate heat when illuminated, nanoparticles, porphyrins and porphyrin derivatives (e.g., chlorins, bacteriochlorins, isobacteriochlorins, phthalocyanines, and naphthalocyanines), metalloporphyrins, metallophthalocyanines, angelicins, chalcogenapyrrillium dyes, chlorophylls, coumarins, flavins and related compounds such as alloxazine and riboflavin, fullerenes, pheophorbides, pyropheophorbides, cyanines (e.g., merocyanine 540), pheophytins, sapphyrins, texaphyrins, purpurins, porphycenes, phenothiaziniums, methylene blue derivatives, naphthalimides, nile blue derivatives, quinones, perylenequinones (e.g., hypericins, hypocrellins, and cercosporins), psoralens, quinones, retinoids, rhodamines, thiophenes, verdins, xanthene dyes (e.g., eosins, erythrosins, rose bengals), dimeric and oligomeric forms of porphyrins, and prodrugs such as 5-aminolevulinic acid. Advantageously, this approach allows for highly specific targeting of cells of interest (e.g., immune cells) using both a therapeutic agent (e.g., drug) and electromagnetic energy (e.g., radiation or light) concurrently. In some embodiments, the binding protein is fused with, or covalently or non-covalently linked to the agent, for example, directly or via a linker.

[0158] In some embodiments, the binding protein may be chemically modified. For example, a binding protein may be mutated to modify peptide properties such as detectability, stability, biodistribution, pharmacokinetics, half-life, surface charge, hydrophobicity, conjugation sites, pH, function, and the like. N-methylation is one example of methylation that can occur in a binding protein encompassed by the present invention. In some embodiments, a binding protein may be modified by methylation on free amines such as by reductive methylation with formaldehyde and sodium cyanoborohydride.

[0159] A chemical modification may comprise a polymer, a polyether, polyethylene glycol, a biopolymer, a zwitterionic polymer, a polyamino acid, a fatty acid, a dendrimer, an Fc region, a simple saturated carbon chain such as palmitate or myristolate, or albumin. The chemical modification of a binding protein with an Fc region may be a fusion Fc-protein. A polyamino acid may include, for example, a poly amino acid sequence with repeated single amino acids (e.g., poly glycine), and a poly amino acid sequence with mixed poly amino acid sequences that may or may not follow a pattern, or any combination of the foregoing.

[0160] In some embodiments, the binding proteins encompassed by the present invention may be modified. In some embodiments, the modifications having substantial or significant sequence identity to a parent binding protein to generate a functional variant that maintains one or more biophysical and/or biological activities of the parent binding protein (e.g., maintain pMHC binding specificity). In some embodiments, the mutation is a conservative amino acid substitution.

[0161] In some embodiments, binding proteins encompassed by the present invention may comprise synthetic amino acids in place of one or more naturally-occurring amino acids. Such synthetic amino acids are well-known in the art, and include, for example, aminocyclohexane carboxylic acid, norleucine, a-amino n-decanoic acid, homoserine, S-acetylaminomethyl-cysteine, trans-3- and trans-4-hydroxyproline, 4-aminophenylalanine, 4-nitrophenylalanine, 4-chlorophenylalanine, 4-carboxyphenylalanine, β-phenylserine β-hydroxyphenylalanine, phenylglycine, a-naphthylalanine, cyclohexylalanine, cyclohexylglycine, indoline-2-carboxylic acid, 1,2,3,4-tetrahydroisoquinoline-3-carboxylic acid, aminomalonic acid, aminomalonic acid monoamide, N′-benzyl-N′-methyl-lysine, N′,N′-dibenzyl-lysine, 6-hydroxylysine, omithine, a-aminocyclopentane carboxylic acid, oc-aminocyclohexane carboxylic acid, α-aminocycloheptane carboxylic acid, α-(2-amino-2-norbomane)-carboxylic acid, α,γ-diaminobutyric acid, β-diaminopropionic acid, homophenylalanine, and oc-tert-butylglycine.

[0162] Binding proteins encompassed by the present invention may be glycosylated, amidated, carboxylated, phosphorylated, esterified, N-acylated, cyclized (e.g., via a disulfide bridge), or converted into an acid addition salt and/or optionally dimerized or polymerized, or conjugated.

[0163] In some embodiments, the attachment of a hydrophobic moiety, such as to the N-terminus, the C-terminus, or an internal amino acid, may be used to extend half-life of a peptide encompassed by the present invention. In other embodiments, a binding protein may include post-translational modifications (e.g., methylation and/or amidation), which can affect, for example, serum half-life. In some embodiments, simple carbon chains (e.g., by myristoylation and/or palmitylation) may be conjugated to the binding proteins. In some embodiments, the simple carbon chains may render the binding proteins easily separable from the unconjugated material. For example, methods that may be used to separate the binding proteins from the unconjugated material include, but are not limited to, solvent extraction and reverse phase chromatography. The lipophilic moieties can extend half-life through reversible binding to serum albumin. The conjugated moieties may be lipophilic moieties that extend half-life of the peptides through reversible binding to serum albumin. In some embodiments, the lipophilic moiety may be cholesterol or a cholesterol derivative, including cholestenes, cholestanes, cholestadienes and oxysterols. In some embodiments, the binding proteins may be conjugated to myristic acid (tetradecanoic acid) or a derivative thereof. In other embodiments, a binding protein may be coupled (e.g., conjugated) to a half-life modifying agent Examples of half-life modifying agents include but are not limited to: a polymer, a polyethylene glycol (PEG), a hydroxyethyl starch, polyvinyl alcohol, a water soluble polymer, a zwitterionic water soluble polymer, a water soluble poly(amino acid), a water soluble polymer of proline, alanine and serine, a water soluble polymer containing glycine, glutamic acid, and serine, an Fc region, a fatty acid, palmitic acid, or a molecule that binds to albumin. In some embodiments, a spacer or linker may be coupled to a binding protein, such as 1, 2, 3, 4, or more amino acid residues that serve as a spacer or linker in order to facilitate conjugation or fusion to another molecule, as well as to facilitate cleavage of the peptide from such conjugated or fused molecules. In some embodiments, binding proteins may be conjugated to other moieties that, for example, can modify or effect changes to the properties of the binding proteins.

[0164] A binding protein may be produced recombinantly or synthetically, such as by solid-phase peptide synthesis or solution-phase peptide synthesis. Polypeptide synthesis may be performed by known synthetic methods, such as using fluorenylmethyloxycarbonyl (Fmoc) chemistry or by butyloxycarbonyl (Boc) chemistry. Polypeptide fragments may be joined together enzymatically or synthetically.

[0165] In an aspect encompassed by the present invention, provided herein are methods of producing a binding protein described herein, comprising the steps of: (i) culturing a transformed host cell which has been transformed by a nucleic acid comprising a sequence encoding a binding protein described herein under conditions suitable to allow expression of said binding protein; and (ii) recovering the expressed binding protein.

[0166] Methods useful for isolating and purifying recombinantly produced binding protein, by way of example, may include obtaining supernatants from suitable host cell/vector systems that secrete the binding protein into culture media and then concentrating the media using a commercially available filter. Following concentration, the concentrate may be applied to a single suitable purification matrix or to a series of suitable matrices, such as an affinity matrix or an ion exchange resin. One or more reverse phase HPLC steps may be employed to further purify a recombinant polypeptide. These purification methods may also be employed when isolating an immunogen from its natural environment. Methods for large scale production of one or more of binding proteins described herein include batch cell culture, which is monitored and controlled to maintain appropriate culture conditions. Purification of the binding protein may be performed according to methods described herein and known in the art.

[0167] In any of the herein disclosed embodiments, the encoded binding protein is capable of bind to a peptide-MHC (pMHC) complex comprising a peptide epitope selected from Table 2 in the context of an MHC molecule (e.g., a MHC class I molecule). In some embodiments, the MHC molecule comprises an MHC alpha chain that is an HLA serotype selected from the group consisting of HLA-A*02, HLA-A*03, HLA-A*01, HLA-A*11, HLA-A*24, and/or HLA-B*07. In some embodiments, the HLA allele is selected from the group consisting of HLA-A*0201, HLA-A*0202, HLA-A*0203, HLA-A*0204, HLA-A*0205, HLA-A*0206, HLA-A*0207, HLA-A*0210, HLA-A*0211, HLA-A*0212, HLA-A*0213, HLA-A*0214, HLA-A*0216, HLA-A*0217, HLA-A*0219, HLA-A*0220, HLA-A*0222, HLA-A*0224, HLA-A*0230, HLA-A*0242, HLA-A*0253, HLA-A*0260, and HLA-A*0274 allele. In specific embodiments, the HLA allele is HLA-A*0201.

[0168] A variety of assays are well-known for assessing binding affinity and/or determining whether a binding molecule binds (e.g., specifically binding) to a particular ligand (e.g., peptide antigen-MHC complex). It is within the level of a skilled artisan to determine the binding affinity of a binding protein for a target, such as a T cell peptide epitope of a target polypeptide, such as by using any of a number of binding assays that are well-known in the art. For example, in some embodiments, a Biacore™ machine may be used to determine the binding constant of a complex between two proteins. The dissociation constant (K_{D}) for the complex may be determined by monitoring changes in the refractive index with respect to time as buffer is passed over the chip. Other suitable assays for measuring the binding of one protein to another include, for example, immunoassays such as enzyme linked immunosorbent assays (ELISA) and radioimmunoas says (RIA), or determination of binding by monitoring the change in the spectroscopic or optical properties of the proteins through fluorescence, UV absorption, circular dichroism, or nuclear magnetic resonance (NMR). Other exemplary assays include, but are not limited to, Western blot, ELISA, analytical ultracentrifugation, spectroscopy and surface plasmon resonance (Biacore™) analysis (see, e.g., Scatchard et al. (1949) Ann. N.Y. Acad. Sci. 51:660, Wilson (2002) Science 295:2103, Wolff et al. (1993) Cancer Res. 53:2560, and U.S. Pat. Nos. 5,283,173 and 5,468,614), flow cytometry, sequencing and other methods for detection of expressed nucleic acids. In one example, apparent affinity for a target is measured by assessing binding to various concentrations of tetramers, for example, by flow cytometry using labeled multimers, such as MHC-antigen tetramers. In one representative example, apparent K_{D} of a binding protein is measured using 2-fold dilutions of labeled tetramers at a range of concentrations, followed by determination of binding curves by non-linear regression, apparent K_{D} being determined as the concentration of ligand that yielded half-maximal binding.

### III. Nucleic Acids, and Vectors

[0169] In an aspect encompassed by the present invention, provided herein are nucleic acid molecules that encode binding proteins (e.g., TCRs, antigen-binding fragments of the TCRs, CARs, and the like), peptides, and fragments thereof described herein.

[0170] In some embodiments, the nucleic acid molecule hybridizes, under stringent conditions, with the complement of a sequence with at least about at least about 80%, 81%, 82%, 83%, 84%, 85%, 86%, 87%, 88%, 89%, 90%, 91%, 92%, 93%, 94%, 95%, 96%, 97%, 98%, 99%, or more identity, such as over the full length, to a nucleic acid encoding a polypeptide selected from the group consisting of the polypeptide sequences listed in Tables 1A-01 to 1A-05, 1B-01 to 1B-04, 1C-01 to 1C-03, 1D-01 to 1D-03, 1E-01 to 1E-02, and 1F-01 to 1F-03.

[0171] In some embodiments, the nucleic acid molecule hybridizes, under stringent conditions, with the complement of a nucleic acid encoding a polypeptide selected from the group consisting of polypeptide sequences listed in Tables 1A-01 to 1A-05, 1B-01 to 1B-04, 1C-01 to 1C-03, 1D-01 to 1D-03, 1E-01 to 1E-02, and 1F-01 to 1F-03.

[0172] In some embodiments, the nucleic acid molecule comprises (e.g., comprises, consists essentially of, or consists of) a nucleotide sequence encoding a polypeptide selected from the group consisting of polypeptide sequences listed in Tables 1A-01 to 1A-05, 1B-01 to 1B-04, 1C-01 to 1C-03, 1D-01 to 1D-03, 1E-01 to 1E-02, and 1F-01 to 1F-03.

[0173] In some embodiments, the nucleic acids comprise (e.g., comprise, consist essentially of, or consist of) a nucleotide sequence encoding at least one (e.g., one, two, or three) TCR α-chain CDR set forth in Tables 1A-01 to 1A-05, 1B-01 to 1B-04, 1C-01 to 1C-03, 1D-01 to 1D-03, 1E-01 to 1E-02, and 1F-01 to 1F-03. In some embodiments, the nucleic acids comprise (e.g., comprise, consist essentially of, or consist of) a nucleotide sequence encoding a TCR V_{α} domain having an amino acid sequence that is at least about at least about 80%, 81%, 82%, 83%, 84%, 85%, 86%, 87%, 88%, 89%, 90%, 91%, 92%, 93%, 94%, 95%, 96%, 97%, 98%, 99%, or more identity to a TCR V_{α} domain sequence set forth in Tables 1A-01 to 1A-05, 1B-01 to 1B-04, 1C-01 to 1C-03, 1D-01 to 1D-03, 1E-01 to 1E-02, and 1F-01 to 1F-03. In some embodiments, the nucleic acids comprise (e.g., comprise, consist essentially of, or consist of) a nucleotide sequence encoding a TCR α-chain having an amino acid sequence that is at least about at least about 80%, 81%, 82%, 83%, 84%, 85%, 86%, 87%, 88%, 89%, 90%, 91%, 92%, 93%, 94%, 95%, 96%, 97%, 98%, 99%, or more identity to a TCR α-chain sequence set forth in Tables 1A-01 to 1A-05, 1B-01 to 1B-04, 1C-01 to 1C-03, 1D-01 to 1D-03, 1E-01 to 1E-02, and 1F-01 to 1F-03.

[0174] In some embodiments, the nucleic acids comprise (e.g., comprise, consist essentially of, or consist of) a nucleotide sequence encoding at least one (e.g., one, two, or three) TCR β-chain CDR set forth in Tables 1A-01 to 1A-05, 1B-01 to 1B-04, 1C-01 to 1C-03, 1D-01 to 1D-03, 1E-01 to 1E-02, and 1F-01 to 1F-03. In some embodiments, the nucleic acids comprise (e.g., comprise, consist essentially of, or consist of) a nucleotide sequence encoding a TCR V_{β} domain having an amino acid sequence that is at least about at least about 80%, 81%, 82%, 83%, 84%, 85%, 86%, 87%, 88%, 89%, 90%, 91%, 92%, 93%, 94%, 95%, 96%, 97%, 98%, 99%, or more identity to a TCR V_{β} domain sequence set forth in Tables 1A-01 to 1A-05, 1B-01 to 1B-04, 1C-01 to 1C-03, 1D-01 to 1D-03, 1E-01 to 1E-02, and 1F-01 to 1F-03. In some embodiments, the nucleic acids comprise (e.g., comprise, consist essentially of, or consist of) a nucleotide sequence encoding a TCR β-chain having an amino acid sequence that is at least about at least about 80%, 81%, 82%, 83%, 84%, 85%, 86%, 87%, 88%, 89%, 90%, 91%, 92%, 93%, 94%, 95%, 96%, 97%, 98%, 99%, or more identity to a TCR β-chain sequence set forth in Tables 1A-01 to 1A-05, 1B-01 to 1B-04, 1C-01 to 1C-03, 1D-01 to 1D-03, 1E-01 to 1E-02, and 1F-01 to 1F-03.

[0175] The term “nucleic acid” includes “polynucleotide,” “oligonucleotide,” and “nucleic acid molecule,” and generally means a polymer of DNA or RNA, which may be single-stranded or double-stranded, synthesized or obtained (e.g., isolated and/or purified) from natural sources, which may contain natural, non-natural or altered nucleotides, and which may contain a natural, non-natural or altered internucleotide linkage, such as a phosphoroamidate linkage or a phosphorothioate linkage, instead of the phosphodiester found between the nucleotides of an unmodified oligonucleotide. In an embodiment, the nucleic acid comprises complementary DNA (cDNA).

[0176] In some embodiments, the nucleic acids encompassed by the present invention are recombinant. As used herein, the term “recombinant” refers to (i) molecules that are constructed outside living cells by joining natural or synthetic nucleic acid segments to nucleic acid molecules that may replicate in a living cell, or (ii) molecules that result from the replication of those described in (i) above. For purposes herein, the replication may be in vitro replication or in vivo replication.

[0177] The nucleic acids can be constructed based on chemical synthesis and/or enzymatic ligation reactions using procedures known in the art. See, for example, Green and Sambrook et al. supra. For example, a nucleic acid may be chemically synthesized using naturally occurring nucleotides or variously modified nucleotides designed to increase the biological stability of the molecules or to increase the physical stability of the duplex formed upon hybridization (e.g., phosphorothioate derivatives and acridine substituted nucleotides). Examples of modified nucleotides that may be used to generate the nucleic acids include, but are not limited to, 5-fluorouracil, 5-bromouracil, 5-chlorouracil, 5-iodouracil, hypoxanthine, xanthine, 4-acetylcytosine, 5-(carboxyhydroxymethyl) uracil, 5-carboxymethylaminomethyl-2-thiouridine, 5-carboxymethylaminomethyluracil, dihydrouracil, beta-D-galactosylqueosine, inosine, N⁶-isopentenyladenine, 1-methylguanine, 1-methylinosine, 2,2-dimethylguanine, 2-methyladenine, 2-methylguanine, 3-methylcytosine, 5-methylcytosine, N⁶-substituted adenine, 7-methylguanine, 5-methylaminomethyluracil, 5-methoxyaminomethyl-2-thiouracil, beta-D-mannosylqueosine, 5′-methoxycarboxymethyluracil, 5-methoxyuracil, 2-methylthio-N⁶-isopentenyladenine, uracil-5-oxyacetic acid (v), wybutoxosine, pseudouracil, queosine, 2-thiocytosine, 5-methyl-2-thiouracil, 2-thiouracil, 4-thiouracil, 5-methyluracil, uracil-5-oxyacetic acid methylester, 3-(3-amino-3-N-2-carboxypropyl) uracil, and 2,6-diaminopurine. Alternatively, one or more of the nucleic acids encompassed by the present invention can be purchased from companies, such as Integrated DNA Technologies (Coralville, IA).

[0178] In one embodiment, the nucleic acid comprises a codon-optimized nucleotide sequence. Without being bound to a particular theory or mechanism, it is believed that codon optimization of the nucleotide sequence increases the translation efficiency of the mRNA transcripts. Codon optimization of the nucleotide sequence may involve substituting a native codon for another codon that encodes the same amino acid, but can be translated by tRNA that is more readily available within a cell, thus increasing translation efficiency. Optimization of the nucleotide sequence may also reduce secondary mRNA structures that would interfere with translation, thus increasing translation efficiency. In some embodiments, the nucleotide sequences described herein are codon-optimized for expression in a host cell (e.g., an immune cell, such as a T cell).

[0179] The present invention also provides a nucleic acid comprising a nucleotide sequence which is complementary to the nucleotide sequence of any of the nucleic acids described herein or a nucleotide sequence which hybridizes under stringent conditions to the nucleotide sequence of any of the nucleic acids described herein.

[0180] The nucleotide sequence which hybridizes under stringent conditions may hybridize under high stringency conditions. By “high stringency conditions” is meant that the nucleotide sequence specifically hybridizes to a target sequence (the nucleotide sequence of any of the nucleic acids described herein) in an amount that is detectably stronger than non-specific hybridization. High stringency conditions include conditions which would distinguish a polynucleotide with an exact complementary sequence, or one containing only a few scattered mismatches from a random sequence that happened to have a few small regions (e.g., 3-10 bases) that matched the nucleotide sequence. Such small regions of complementarity are more easily melted than a full-length complement of 14-17 or more bases, and high stringency hybridization makes them easily distinguishable. Relatively high stringency conditions would include, for example, low salt and/or high temperature conditions, such as provided by about 0.02-0.1 M NaCl or the equivalent, at temperatures of about 50-70° C. Such high stringency conditions tolerate little, if any, mismatch between the nucleotide sequence and the template or target strand, and are particularly suitable for detecting expression of any of the inventive TCRs. It is generally appreciated that conditions may be rendered more stringent by the addition of increasing amounts of formamide.

[0181] The present invention also provides a nucleic acid comprising a nucleotide sequence that is at least about 80%, 81%, 82%, 83%, 84%, 85%, 86%, 87%, 88%, 89%, 90%, 91%, 92%, 93%, 94%, 95%, 96%, 97%, 98%, 99%, or more identical to any of the nucleic acids described herein.

[0182] Typically, said nucleic acid is a DNA or RNA molecule, which may be included in a suitable vector, such as a plasmid, cosmid, episome, artificial chromosome, phage or a viral vector.

[0183] The terms “vector”, “cloning vector” and “expression vector” mean the vehicle by which a DNA or RNA sequence (e.g., a foreign gene) can be introduced into a host cell, so as to transform the host and promote expression (e.g., transcription and translation) of the introduced sequence. Thus, a further object encompassed by the present invention relates to a vector comprising a nucleic acid encompassed by the present invention.

[0184] Such vectors may comprise regulatory elements, such as a promoter, enhancer, terminator and the like, to cause or direct expression of said polypeptide upon administration to a subject Examples of promoters and enhancers used in the expression vector for animal cell include early promoter and enhancer of SV40 (Mizukami T. et al. 1987), LTR promoter and enhancer of Moloney mouse leukemia virus (Kuwana Y et al. 1987), promoter (Mason J O et al. 1985) and enhancer (Gillies S D et al. 1983) of immunoglobulin H chain and the like.

[0185] Any expression vector for animal cell may be used. Examples of suitable vectors include pAGE107 (Miyaji H et al. 1990), pAGE103 (Mizukami T et al. 1987), pHSG274 (Brady G et al. 1984), pKCR (O'Hare K et al. 1981), pSG1 beta d2-4-(Miyaji H et al. 1990) and the like. Other representative examples of plasmids include replicating plasmids comprising an origin of replication, or integrative plasmids, such as for instance pUC, pcDNA, pBR, and the like. Representative examples of viral vector include adenoviral, retroviral, lentiviral, herpes virus and AAV vectors. Such recombinant viruses may be produced by techniques known in the art, such as by transfecting packaging cells or by transient transfection with helper plasmids or viruses. Typical examples of virus packaging cells include PA317 cells, PsiCRIP cells, GPenv-positive cells, 293 cells, etc. Detailed protocols for producing such replication-defective recombinant viruses are well-known in the art and may be found, for instance, in PCT Publ. WO 95/14785, PCT. Publ. WO 96/22378, U.S. Pat. Nos. 5,882,877, 6,013,516, 4,861,719, 5,278,056, and PCT Publ. WO 94/19478.

[0186] In some embodiments, the composition comprises an expression vector comprising an open reading frame encoding a binding protein or a polypeptide described herein or a fragment thereof. In some embodiments, the nucleic acid includes regulatory elements necessary for expression of the open reading frame. Such elements may include, for example, a promoter, an initiation codon, a stop codon, and a polyadenylation signal. In addition, enhancers may be included. These elements may be operably linked to a sequence that encodes the binding protein, polypeptide or fragment thereof.

[0187] Examples of promoters include, but are not limited to, promoters from Simian Virus 40 (SV40), Mouse Mammary Tumor Virus (MMTV) promoter, Human Immunodeficiency Virus (HIV) such as the HIV Long Terminal Repeat (LTR) promoter, Moloney virus, Cytomegalovirus (CMV) such as the CMV immediate early promoter, Epstein Barr Virus (EBV), Rous Sarcoma Virus (RSV) as well as promoters from human genes such as human actin, human myosin, human hemoglobin, human muscle creatine, and human metalothionein. Examples of suitable polyadenylation signals include but are not limited to SV40 polyadenylation signals and LTR polyadenylation signals.

[0188] In addition to the regulatory elements required for expression, other elements may also be included in the nucleic acid molecule. Such additional elements include enhancers. Enhancers include the promoters described herein. In some embodiments, enhancers/promoters include, for example, human actin, human myosin, human hemoglobin, human muscle creatine and viral enhancers such as those from CMV, RSV and EBV.

[0189] In some embodiments, the nucleic acid may be operably incorporated in a carrier or delivery vector as described further below. Useful delivery vectors include but are not limited to biodegradable microcapsules, immuno-stimulating complexes (ISCOMs) or liposomes, and genetically engineered attenuated live carriers such as viruses or bacteria.

[0190] In some embodiments, the vector is a viral vector, such as lentiviruses, retroviruses, herpes viruses, adenoviruses, adeno-associated viruses, vaccinia viruses, baculoviruses, Fowl pox, AV-pox, modified vaccinia Ankara (MVA) and other recombinant viruses. For example, a lentivirus vector may be used to infect T cells.

[0191] In some embodiments, the recombinant expression vector is capable of delivering a polynucleotide to an appropriate host cell, for example, a T cell or an antigen-presenting cell, i.e., a cell that displays a peptide/MHC complex on its cell surface (e.g., a dendritic cell) and lacks CD8. In some embodiments, the host cell is a hematopoietic progenitor cell or a human immune system cell. For example, the immune system cell may be a CD4⁺ T cell, a CD8⁺ T cell, a CD4/CD8 double negative T cell, a gd T cell, a natural killer cell, a dendritic cell, or any combination thereof. In some embodiments, wherein a T cell is the host, the T cell may be naive, a central memory T cell, an effector memory T cell, or any combination thereof. The recombinant expression vectors may therefore also include, for example, lymphoid tissue-specific transcriptional regulatory elements (TREs), such as a B lymphocyte, T lymphocyte, or dendritic cell specific TREs. Lymphoid tissue specific TREs are known in the art (see, e.g., Thompson et al. (1992) Mol. Cell. Biol. 72:1043, Todd et al. (1993) J. Exp. Med. 777:1663, and Penix et al. (1993) J. Exp. Med. 775:1483).

[0192] In some embodiments, a recombinant expression vector comprises a nucleotide sequence encoding a TCR α chain, a TCR β chain, and/or a linker peptide. For example, in some embodiments, the recombinant expression vector comprises a nucleotide sequence encoding the full-length TCR alpha and TCR beta chains of the binding protein with a linker positioned between them, wherein the nucleotide sequence encoding the beta chain is positioned 5′ of the nucleotide sequence encoding the alpha chain. In some embodiments, the nucleotide sequence encodes the full-length TCR alpha and TCR beta chains with a linker positioned between them, wherein the nucleotide sequence encoding the TCR beta chain is positioned 3′ of the nucleotide sequence encoding the TCR alpha chain. In some embodiments, the full-length TCR alpha and/or TCR beta chains are replaced with fragments thereof.

[0193] As described further below, another aspect encompassed by the present invention relates to a cell which has been transfected, infected or transformed by a nucleic acid and/or a vector in accordance with the present invention. A host cell may include any individual cell or cell culture which may receive a vector or the incorporation of nucleic acids and/or proteins, as well as any progeny cells. The term also encompasses progeny of the host cell, whether genetically or phenotypically the same or different. Suitable host cells may depend on the vector and may include mammalian cells, animal cells, human cells, simian cells, insect cells, yeast cells, and bacterial cells. These cells may be induced to incorporate the vector or other material by use of a viral vector, transformation via calcium phosphate precipitation, DEAE-dextran, electroporation, microinjection, or other methods (see, e.g., Sambrook el al. (1989) Molecular Cloning: A Laboratory Manual 2d ed. (Cold Spring Harbor Laboratory)). The term “transformation” means the introduction of a “foreign” (i.e., extrinsic or extracellular) gene, DNA or RNA sequence to a host cell, so that the host cell will express the introduced gene or sequence to produce a desired substance, typically a protein or enzyme coded by the introduced gene or sequence. A host cell that receives and expresses introduced DNA or RNA has been “transformed.” The nucleic acids encompassed by the present invention may be used to produce a recombinant polypeptide encompassed by the present invention in a suitable expression system. The term “expression system” means a host cell and compatible vector under suitable conditions, e.g., for the expression of a protein coded for by foreign DNA carried by the vector and introduced to the host cell.

[0194] Common expression systems include E. coli host cells and plasmid vectors, insect host cells and Baculovirus vectors, and mammalian host cells and vectors. Other examples of host cells include, without limitation, prokaryotic cells (such as bacteria) and eukaryotic cells (such as yeast cells, mammalian cells, insect cells, plant cells, etc.). Specific examples include E. coli, Kluyveromyces or Saccharomyces yeasts, mammalian cell lines (e.g., Vero cells, CHO cells, 3T3 cells, COS cells, etc.) as well as primary or established mammalian cell cultures (e.g., produced from lymphoblasts, fibroblasts, embryonic cells, epithelial cells, nervous cells, adipocytes, etc.). Examples also include mouse SP2/0-Ag14 cell (ATCC CRL1581), mouse P3X63-Ag8.653 cell (ATCC CRL1580), CHO cell in which a dihydrofolate reductase gene (hereinafter referred to as “DHFR gene”) is defective (Urlaub G et al (1980), rat YB2/3HL.P2.G11.16Ag.20 cell (ATCC CRL 1662, hereinafter referred to as “YB2/0 cell”), and the like. In some embodiments, the YB2/0 cell is used since ADCC activity of chimeric or humanized binding proteins is enhanced when expressed in this cell.

[0195] The present invention also encompasses methods of producing a recombinant host cell expressing binding proteins, peptides and fragments thereof encompassed by the present invention, said method comprising the steps consisting of (i) introducing in vitro or ex vivo a recombinant nucleic acid or a vector as described above into a competent host cell, (ii) culturing in vitro or ex vivo the recombinant host cell obtained and (iii), optionally, selecting the cells which express said binding proteins, peptides and fragments thereof. Such recombinant host cells may be used for the diagnostic, prognostic, and/or therapeutic method encompassed by the present invention.

[0196] In another aspect, the present invention provides isolated nucleic acids that hybridize under selective hybridization conditions to a polynucleotide disclosed herein. Thus, the polynucleotides of this embodiment may be used for isolating, detecting, and/or quantifying nucleic acids comprising such polynucleotides. For example, polynucleotides encompassed by the present invention may be used to identify, isolate, or amplify partial or full-length clones in a deposited library. In some embodiments, the polynucleotides are genomic or cDNA sequences isolated, or otherwise complementary to, a cDNA from a human or mammalian nucleic acid library. In some embodiments, the cDNA library comprises at least about 75%, 76%, 77%, 78%, 79%, 80%, 81%, 82%, 83%, 84%, 85%, 86%, 87%, 88%, 89%, 90%, 91%, 92%, 93% 94% 95%, 96%, 97% 98%, 99% or more, or any range in between, inclusive, such as at least about 80%-100%, full-length sequences. The cDNA libraries may be normalized to increase the representation of rare sequences. Low or moderate stringency hybridization conditions are typically, but not exclusively, employed with sequences having a reduced sequence identity relative to complementary sequences. Moderate and high stringency conditions may optionally be employed for sequences of greater identity. Low stringency conditions allow selective hybridization of sequences having about 70% sequence identity and may be employed to identify orthologous or paralogous sequences. Optionally, polynucleotides encompassed by the present invention will encode at least a portion of a binding protein encoded by the polynucleotides described herein. The polynucleotides encompassed by the present invention embrace nucleic acid sequences that may be employed for selective hybridization to a polynucleotide encoding a binding protein encompassed by the present invention (see, e.g., Ausubel, supra and Colligan, supra).

### IV. Host Cells

[0197] In an aspect encompassed by the present invention, provided herein are host cells that express the binding proteins (e.g., TCRs, antigen-binding fragments of TCRs, CARs, or fusion proteins comprising a TCR and an effector domain) described herein. In some embodiments, the host cells comprise the nucleic acids or vectors described herein.

[0198] In some embodiments, a polynucleotide encoding a binding protein is used to transform, transfect, or transduce a host cell (e.g., a T cell) for use in adoptive transfer therapy. Advances in nucleic acid sequencing and particular TCR sequencing have been described (e.g., Robins et al. (2009) Blood 114:4099; Robins et al. (2010) Sci. Translat. Med. 2:47ra64, Robins et al. (2011) J. Imm. Meth., and Warren et al. (2011) Genome Res. 21:790) and may be employed in the course of practicing embodiments encompassed by the present invention. Similarly, methods for transfecting or transducing T cells with desired nucleic acids are well-known in the art (e.g., U.S. Pat. Publ. No. US 2004/0087025) as have adoptive transfer procedures using T cells of desired antigen-specificity (e.g., Schmitt et al. (2009) Hum. Gen. 20:1240, Dossett et al. (2009) Mol. Ther. 77:742, Till et al. (2008) Blood 772:2261, Wang et al. (2007) Hum. Gene Ther. 18:112, Kuball et al. (2007) Blood 709:2331, U.S. Pat. Publ. 2011/0243972, U.S. Pat. Publ. 2011/0189141, and Leen et al. (2007) Ann. Rev. Immunol. 25:243).

[0199] Any suitable immune cell may be modified to include a heterologous polynucleotide encompassed by the present invention, including, for example, a T cell, a NK cell, or a NK-T cell. In some embodiments, the cell may be a primary cell or a cell of a cell line. In some embodiments, a modified immune cell comprises a CD4⁺ T cell, a CD8⁺ T cell, or both. For purposes herein, the T cell may be any T cell, such as a cultured T cell, e.g., a primary T cell, or a T cell from a cultured T cell line, e.g., Jurkat, SupT1, etc., or a T cell obtained from a mammal. If obtained from a mammal, the T cell may be obtained from numerous sources, including but not limited to blood, bone marrow, lymph node, the thymus, or other tissues or fluids. T cells may also be enriched for or purified. In some embodiments, the T cell is a human T cell. In some embodiments, the T cell is a T cell isolated from a human. The T cell may be any type of T cell and may be of any developmental stage, including but not limited to, cytotoxic lymphocyte, cytotoxic lymphocyte precursor cell, cytotoxic lymphocyte progenitor cell, cytotoxic lymphocyte stem cell, CD4⁺/CD8⁺ double positive T cells, CD4⁺ helper T cells, e.g., Th1 and Th2 cells, CD4⁺ T cells, CD8⁺ T cells (e.g., cytotoxic T cells), tumor infiltrating lymphocytes (TILs), memory T cells (e.g., central memory T cells and effector memory T cells), naive T cells, and the like.

[0200] Any appropriate method may be used to transfect or transduce the cells, for example, T cells, or to administer the nucleotide sequences or compositions of the present methods. Methods for delivering polynucleotides to host cells include, for example, use of cationic polymers, lipid-like molecules, and certain commercial products such as, for example, in vivo-jetPEI®. Other methods include ex vivo transduction, injection, electroporation, DEAE-dextran, sonication loading, liposome-mediated transfection, receptor-mediated transduction, microprojectile bombardment, transposon-mediated transfer, and the like. Still further methods of transfecting or transducing host cells employ vectors, described in further detail herein.

[0201] Modified immune cells as described herein may be functionally characterized using methodologies for assaying T cell activity, including determination of T cell binding, activation or induction and also including determination of T cell responses that are antigen-specific. Examples include determination of T cell proliferation, T cell cytokine release, antigen-specific T cell stimulation, MHC restricted T cell stimulation, CTL activity (e.g., by detecting ⁵¹Cr release from pre-loaded target cells), changes in T cell phenotypic marker expression, and other measures of T-cell functions.

[0202] Procedures for performing these and similar assays may be found, for example, in Lefkovits (Immunology Methods Manual: Hie Comprehensive Sourcebook of Techniques, 1998), as well as Current Protocols in Immunology, Weir, (1986) Handbook of Experimental Immunology, Blackwell Scientific, Boston, MA; Mishell and Shigii (eds.) (1979) Selected Methods in Cellular Immunology, Freeman Publishing, San Francisco, CA; Green and Reed (1998) Science 281:1309, and references cited therein.

[0203] In some embodiments, apparent affinity for a binding protein, such as a TCR or antigen-binding portion thereof, may be measured by assessing binding to various concentrations of MHC multimers. “MHC-peptide multimer staining” refers to an assay used to detect antigen-specific T cells, which, in some embodiments, features a tetramer of MHC molecules, each comprising an identical peptide having an amino acid sequence that is cognate (e.g., identical or related to) at least one antigen (e.g., a SARS-CoV-2 antigen comprising a peptide epitope selected from Table 2), wherein the complex is capable of binding to a binding protein, such as a TCR or antigen-binding portion thereof, that recognizes the cognate antigen. Each of the MHC molecules may be tagged with a biotin molecule. Biotinylated MHC/peptides may be multimerized (e.g., tetramerized) by the addition of streptavidin, which may be fluorescently labeled.

[0204] The multimer may be detected by flow cytometry via the fluorescent label. In some embodiments, a pMHC multimer assay is used to detect or select enhanced affinity binding protein, such as a TCR or antigen-binding portion thereof, encompassed by the present invention. In some examples, apparent K_{D} of a binding protein, such as a TCR or antigen-binding portion thereof, is measured using 2-fold dilutions of labeled multimers at a range of concentrations, followed by determination of binding curves by non-linear regression, apparent K_{D} being determined as the concentration of ligand that yielded half-maximal binding.

[0205] Levels of cytokines may be determined using methods described herein, such as ELISA, ELISPOT, intracellular cytokine staining, and flow cytometry and combinations thereof (e.g., intracellular cytokine staining and flow cytometry).

[0206] Immune cell proliferation and clonal expansion resulting from an antigen-specific elicitation or stimulation of an immune response may be determined by isolating lymphocytes, such as circulating lymphocytes in samples of peripheral blood cells or cells from lymph nodes, stimulating the cells with antigen, and measuring cytokine production, cell proliferation and/or cell viability, such as by incorporation of tritiated thymidine or non-radioactive assays, such as MTT assays and the like. The effect of an immunogen described herein on the balance between a Th1 immune response and a Th2 immune response may be examined, for example, by determining levels of Th1 cytokines, such as IFN-g, IL-12, IL-2, and TNF-b, and Type 2 cytokines, such as IL-4, IL-5, IL-9, IL-10, and IL-13.

[0207] A host cell encompassed by the present invention may comprise a single polynucleotide that encodes a binding protein as described herein, or the binding protein may be encoded by more than one polynucleotide. In other words, components or portions of a binding protein may be encoded by two or more polynucleotides, which may be contained on a single nucleic acid molecule or may be contained on two or more nucleic acid molecules.

[0208] In some embodiments, a polynucleotide encoding two or more components or portions of a binding protein encompassed by the present invention comprises the two or more coding sequences operatively associated in a single open reading frame. Such an arrangement can advantageously allow coordinated expression of desired gene products, such as, for example, contemporaneous expression of alpha- and beta-chains of a TCR, such that they are produced in about a 1:1 ratio. In some embodiments, two or more substituent gene products of a binding protein encompassed by the present invention, such as a TCR (e.g., alpha- and beta-chains) or CAR, are expressed as separate molecules and associate post-translationally. In further embodiments, two or more substituent gene products of a binding protein encompassed by the present invention are expressed as a single peptide with the parts separated by a cleavable or removable segment. For instance, self-cleaving peptides useful for expression of separable polypeptides encoded by a single polynucleotide or vector are known in the art and include, for example, a porcine teschovirus-1 2 A (P2A) peptide, a thoseaasigna virus 2A (T2A) peptide, an equine rhinitis A virus (ERAV) 2A (E2A) peptide, and a foot-and-mouth disease vims 2A (F2A) peptide.

[0209] In some embodiments, a binding protein encompassed by the present invention comprises one or more junction amino acids. “Junction amino acids” or “junction amino acid residues” refer to one or more (e.g., 2 to about 10) amino acid residues between two adjacent motifs, regions or domains of a polypeptide, such as between a binding domain and an adjacent constant domain or between a TCR chain and an adjacent self-cleaving peptide. Junction amino acids can result from the design of a construct that encodes a fusion protein (e.g., amino acid residues resulting from the use of a restriction enzyme site during the construction of a nucleic acid molecule encoding a fusion protein), or from cleavage of, for example, a self-cleaving peptide adjacent one or more domains of an encoded binding protein encompassed by the present invention (e.g., a P2A peptide disposed between a TCR α-chain and a TCR β-chain, the self-cleavage of which can leave one or more junction amino acids in the α-chain, the TCR β-chain, or both).

[0210] Engineered immune cells encompassed by the present invention may be administered as therapies for, e.g., COVID-19. In some circumstances, it may be desirable to reduce or stop the activity associated with a cellular immunotherapy. Thus, in some embodiments, an engineered immune cell encompassed by the present invention comprises a heterologous polynucleotide encoding a binding protein and an accessory protein, such as a safety switch protein, which can be targeted using a cognate drug or other compound to selectively modulate the activity (e.g., lessen or ablate) of such cells when desirable. Safety switch proteins used in this regard include, for example, a truncated EGF receptor polypeptide (huEGFRt) that is devoid of extracellular N-terminal ligand binding domains and intracellular receptor tyrosine kinase activity but retains the native amino acid sequence, type I transmembrane cell surface localization, and a conformationally intact binding epitope for pharmaceutical-grade anti-EGFR monoclonal antibody, cetuximab (Erbitux) tEGF receptor (tEGFr; Wang et al. (2011) Blood 118:1255-1263), a caspase polypeptide (e.g., iCasp9; Straathof et al. (2005) Blood 105:4247-4254, Di Stasi et al. (2011) N. Engl. J. Med. 365:1673-1683, Zhou and Brenner (2016) Hematol. pii:S0301-472X:30513-30516), RQR8 (Philip et al. (2014) Blood 124:1277-1287), and a human c-myc protein tag (Kieback et al. (2008) Proc. Natl. Acad. Sci. USA 105:623-628)

[0211] Other accessory components useful for therapeutic cells comprise a tag or selection marker that allows the cells to be identified, sorted, isolated, enriched, or tracked. For example, marked immune cells having desired characteristics (e.g., an antigen-specific TCR and a safety switch protein) may be sorted away from unmarked cells in a sample and more efficiently activated and expanded for inclusion in a therapeutic product of desired purity.

[0212] As used herein, the term “selection marker” comprises a nucleic acid construct that confers an identifiable change to a cell permitting detection and positive selection of immune cells transduced with a polynucleotide comprising a selection marker. For example, RQR is a selection marker that comprises a major extracellular loop of CD20 and two minimal CD34 binding sites. In some embodiments, an RQR-encoding polynucleotide comprises a polynucleotide that encodes the 16 amino acid CD34 minimal epitope. In some embodiments, such as certain embodiments provided in the examples herein, the CD34 minimal epitope is incorporated at the amino terminal position of the CD8 stalk domain (Q8). In further embodiments, the CD34 minimal binding site sequence may be combined with a target epitope for CD20 to form a compact marker/suicide gene for T cells (RQR8) (Philip et al. 2014). This construct allows for the selection of immune cells expressing the construct, with for example, CD34-specific antibody bound to magnetic beads (Miltenyi) and that utilizes clinically accepted pharmaceutical antibody, rituximab, that allows for the selective deletion of a transgene expressing engineered T cell (e.g., Philip et al. (2014) Blood 124:1277-1287, U.S. Pat. Publ. 2015-0093401, U.S. Pat. Publ. 2018-0051089).

[0213] Further exemplary selection markers include several truncated type I transmembrane proteins normally not expressed on T cells: the truncated low-affinity nerve growth factor, truncated CD19, and truncated CD34 (e.g., Di Stasi et al. (2011) N. Engl. J. Med. 365:1673-1683, Mavilio et al. (1994) Blood 83:1988-1997, and Fehse et al. (2000) Mol. Ther. 7:448-456). A particularly attractive feature of CD19 and CD34 is the availability of the off-the-shelf Miltenyi CliniMACs™ selection system that can target these markers for clinical-grade sorting. However, CD19 and CD34 are relatively large surface proteins that may tax the vector packaging capacity and transcriptional efficiency of an integrating vector. Surface markers containing the extracellular, non-signaling domains or various proteins (e.g., CD19, CD34, LNGFR, etc.) also may be employed. Any selection marker may be employed and should be acceptable for good manufacturing practices. In some embodiments, selection markers are expressed with a polynucleotide that encodes a gene product of interest (e.g., a binding protein encompassed by the present invention, such as a TCR or CAR, or antigen-binding fragment thereof). Further examples of selection markers include, for example, reporters such as GFP, EGFP, R-gal or chloramphenicol acetyltransferase (CAT). In some embodiments, a selection marker, such as, for example, CD34 is expressed by a cell and the CD34 may be used to select enrich for, or isolate (e.g., by immunomagnetic selection) the transduced cells of interest for use in the methods described herein. As used herein, a CD34 marker is distinguished from an anti-CD34 antibody, or, for example, a scFv, TCR, or other antigen recognition moiety that binds to CD34.

[0214] In some embodiments, a selection marker comprises an RQR polypeptide, a truncated low-affinity nerve growth factor (tNGFR), a truncated CD19 (tCD19), a truncated CD34 (tCD34), or any combination thereof.

[0215] By way of background, inclusion of CD4⁺ T cells in an immunotherapy cell product can provide antigen-induced IL-2 secretion and augment persistence and function of transferred cytotoxic CD8⁺ T cells (e.g., Kennedy et al. (2008) Immunol. Rev. 222:129 and Nakanishi et al. Nature (2009) 52:510). In some embodiments, a class I-restricted TCR in CD4⁺ T cells may require the transfer of a CD8 co-receptor to enhance sensitivity of the TCR to class I HLA peptide complexes. CD4 co-receptors differ in structure to CD8 and cannot effectively substitute for CD8 co-receptors (e.g., Stone & Kranz (2013) Front. Immunol. 4:244 and Cole et al. (2012) Immunology 737:139). Thus, another accessory protein for use in the compositions and methods encompassed by the present invention comprises a CD8 co-receptor or component thereof. Engineered immune cells comprising a heterologous polynucleotide encoding a binding protein encompassed by the present invention may, in some embodiments, further comprise a heterologous polynucleotide encoding a CD8 co-receptor protein, or a beta-chain or alpha-chain component thereof.

[0216] An host cell may be efficiently transduced to contain, and may efficiently express, a single polynucleotide that encodes the binding protein, safety switch protein, selection marker, and CD8 co-receptor protein.

[0217] In one embodiment, the host cell encompassed by the present invention further includes a nucleic acid encoding a co-stimulatory molecule, such that the modified T cell expresses the co-stimulatory molecule. In some embodiments, the co-stimulatory domain is selected from CD3, CD27, CD28, CD83, CD86, CD127, 4-1BB, 4-1BBL, PD1 and PD1L.

[0218] In any of the foregoing embodiments, a host cell that express the binding protein described herein may be a universal immune cell. A “universal immune cell” comprises an immune cell that has been modified to reduce or eliminate expression of one or more endogenous genes that encode a polypeptide product selected from PD-1, LAG-3, CTLA4, TIM3, TIGIT, an HLA molecule, a TCR molecule, or any combination thereof. Without wishing to be bound by theory, certain endogenously expressed immune cell proteins may downregulate the immune activity of the modified immune cells (e.g., PD-1, LAG-3, CTLA4, TIGIT), or may interfere with the binding activity of a heterologously expressed binding protein encompassed by the present invention (e.g., an endogenous TCR that binds a non-SARS-CoV-2 antigen and interferes with the modified immune cell binding to a target cell that expresses a SARS-CoV-2 antigen such as a peptide epitope selected from Table 2 in the context of a MHC molecule. Further, endogenous proteins (e.g., immune cell proteins, such as an HLA allele) expressed on a donor immune cell may be recognized as foreign by an allogeneic host, which may result in elimination or suppression of the modified donor immune cell by the allogeneic host.

[0219] Accordingly, decreasing or eliminating expression or activity of such endogenous genes or proteins can improve the activity, tolerance, or persistence of the modified immune cells in an autologous or allogeneic host setting, and allows universal administration of the cells (e.g., to any recipient regardless of HLA type). In some embodiments, cells in accordance with the present invention are syngeneic, meaning that they are genetically identical or sufficiently identical and immunologically compatible as to allow for transplantation. In some embodiments, a universal immune cell is a donor cell (e.g., allogeneic) or an autologous cell. In some embodiments, a modified immune cell (e.g., a universal immune cell) encompassed by the present invention comprises a chromosomal gene knockout of one or more of a gene that encodes PD-1, LAG-3, CTLA4, TIM3, TIGIT, an HLA component (e.g., a gene that encodes an α1 macroglobulin, an α2 macroglobulin, an α3 macroglobulin, a β1 microglobulin, or a β2 microglobulin), or a TCR component (e.g., a gene that encodes a TCR variable region or a TCR constant region) (see, e.g., Torikai el al. (2016) Nature Sci. Rep. 6:21757; Torikai et al. (2012) Blood 179:5697; and Torikai et al. (2013) Blood 722:1341, which also provide representative, exemplary gene editing techniques, compositions, and adoptive cell therapies useful according to the present invention).

[0220] As used herein, the term “chromosomal gene knockout” refers to a genetic alteration or introduced inhibitory agent in a host cell that prevents (e.g., reduces, delays, suppresses, or abrogates) production, by the host cell, of a functionally active endogenous polypeptide product Alterations resulting in a chromosomal gene knockout may include, for example, introduced nonsense mutations (including the formation of premature stop codons), missense mutations, gene deletion, and strand breaks, as well as the heterologous expression of inhibitory nucleic acid molecules that inhibit endogenous gene expression in the host cell.

[0221] In some embodiments, a chromosomal gene knock-out or gene knock-in may be made by chromosomal editing of a host cell. Chromosomal editing may be performed using, for example, endonucleases. As used herein “endonuclease” refers to an enzyme capable of catalyzing cleavage of a phosphodiester bond within a polynucleotide chain. In some embodiments, an endonuclease is capable of cleaving a targeted gene thereby inactivating or “knocking out” the targeted gene. An endonuclease may be a naturally occurring, recombinant, genetically modified, or fusion endonuclease. The nucleic acid strand breaks caused by the endonuclease are commonly repaired through the distinct mechanisms of homologous recombination or non-homologous end joining (NHEJ). During homologous recombination, a donor nucleic acid molecule may be used for a donor gene “knock-in”, for target gene “knock-out”, and optionally to inactivate a target gene through a donor gene knock in or target gene knock out event NHEJ is an error-prone repair process that often results in changes to the DNA sequence at the site of the cleavage, e.g., a substitution, deletion, or addition of at least one nucleotide. NHEJ may be used to “knock-out” a target gene. Examples of endonucleases include zinc finger nucleases, TALE-nucleases, CRISPR-Cas nucleases, meganucleases, and megaTALs.

[0222] As used herein, a “zinc finger nuclease” (ZFN) refers to a fusion protein comprising a zinc finger DNA-binding domain fused to a non-specific DNA cleavage domain, such as a Fokl endonuclease. Each zinc finger motif of about 30 amino acids binds to about 3 base pairs of DNA, and amino acids at certain residues may be changed to alter triplet sequence specificity (e.g., Desjarlais et al. (1993) Proc. Natl. Acad. Sci. 90:2256-2260 and Wolfe et al. (1999) J. Mol. Biol. 255:1917-1934). Multiple zinc finger motifs may be linked in tandem to create binding specificity to desired DNA sequences, such as regions having a length ranging from about 9 to about 18 base pairs. By way of background, ZFNs mediate genome editing by catalyzing the formation of a site-specific DNA double strand break (DSB) in the genome, and targeted integration of a transgene comprising flanking sequences homologous to the genome at the site of DSB is facilitated by homology directed repair. Alternatively, a DSB generated by a ZFN can result in knock out of target gene via repair by non-homologous end joining (NHEJ), which is an error-prone cellular repair pathway that results in the insertion or deletion of nucleotides at the cleavage site. In some embodiments, a gene knockout comprises an insertion, a deletion, a mutation or a combination thereof, made using a ZFN molecule.

[0223] As used herein, a “transcription activator-like effector nuclease” (TALEN) refers to a fusion protein comprising a TALE DNA-binding domain and a DNA cleavage domain, such as a Fokl endonuclease. A “TALE DNA binding domain” or “TALE” is composed of one or more TALE repeat domains/units, each generally having a highly conserved 33-35 amino acid sequence with divergent 12th and 13th amino acids. The TALE repeat domains are involved in binding of the TALE to a target DNA sequence. The divergent amino acid residues, referred to as the repeat variable diresidue (RVD), correlate with specific nucleotide recognition. The natural (canonical) code for DNA recognition of these TALEs has been determined such that an HD (histine-aspartic acid) sequence at positions 12 and 13 of the TALE leads to the TALE binding to cytosine (C), NG (asparagine-glycine) binds to a T nucleotide, NI (asparagine-isoleucine) to A, NN (asparagine-asparagine) binds to a G or A nucleotide, and NG (asparagine-glycine) binds to a T nucleotide. Non-canonical (atypical) RVDs are also well-known in the art (e.g., U.S. Pat. Publ. No. US 2011/0301073, which atypical RVDs are incorporated by reference herein in their entirety). TALENs may be used to direct site-specific double-strand breaks (DSB) in the genome of T cells. Non-homologous end joining (NHEJ) ligates DNA from both sides of a double-strand break in which there is little or no sequence overlap for annealing, thereby introducing errors that knock out gene expression. Alternatively, homology directed repair can introduce a transgene at the site of DSB providing homologous flanking sequences are present in the transgene. In some embodiments, a gene knockout comprises an insertion, a deletion, a mutation or a combination thereof, and made using a TALEN molecule.

[0224] As used herein, a “clustered regularly interspaced short palindromic repeats/Cas” (CRISPR/Cas) nuclease system refers to a system that employs a CRISPR RNA (crRNA)-guided Cas nuclease to recognize target sites within a genome (known as protospacers) via base-pairing complementarity and then to cleave the DNA if a short, conserved protospacer associated motif (PAM) immediately follows 3′ of the complementary target sequence. CRISPR/Cas systems are classified into three types (i.e., type I, type II, and type III) based on the sequence and structure of the Cas nucleases. The crRNA-guided surveillance complexes in types I and III need multiple Cas subunits. Type II system, the most studied, comprises at least three components: an RNA-guided Cas9 nuclease, a crRNA, and a trans-acting crRNA (tracrRNA). The tracrRNA comprises a duplex forming region. A crRNA and a tracrRNA form a duplex that is capable of interacting with a Cas9 nuclease and guiding the Cas9/crRNA:tracrRNA complex to a specific site on the target DNA via Watson-Crick base-pairing between the spacer on the crRNA and the protospacer on the target DNA upstream from a PAM. Cas9 nuclease cleaves a double-stranded break within a region defined by the crRNA spacer. Repair by NHEJ results in insertions and/or deletions which disrupt expression of the targeted locus. Alternatively, a transgene with homologous flanking sequences may be introduced at the site of DSB via homology directed repair. The crRNA and tracrRNA may be engineered into a single guide RNA (sgRNA or gRNA) (e.g., Jinek et al. (2012) Science 337:816-821). Further, the region of the guide RNA complementary to the target site may be altered or programed to target a desired sequence (Xie et al. (2014) PLOS One 9:e100448, U.S. Pat. Publ. No. US 2014/0068797, U.S. Pat Publ. No. US 2014/0186843, U.S. Pat. No. 8,697,359, and PCT Publ. No. WO 2015/071474). In some embodiments, a gene knockout comprises an insertion, a deletion, a mutation or a combination thereof, and made using a CRISPR/Cas nuclease system.

[0225] Exemplary gRNA sequences and methods of using the same to knock out endogenous genes that encode immune cell proteins include those described in Ren et al. (2017) Clin. Cancer Res. 23:2255-2266, which provides representative, exemplary gRNAs, CAS9 DNAs, vectors, and gene knockout techniques.

[0226] As used herein, a “meganuclease,” also referred to as a “homing endonuclease,” refers to an endodeoxyribonuclease characterized by a large recognition site (double stranded DNA sequences of about 12 to about 40 base pairs). Meganucleases may be divided into five families based on sequence and structure motifs: LAGLIDADG, GlY-YIG, HNH, His-Cys box, and PD-(D/E)XK. Exemplary meganucleases include I-Scel, I-Ceul, PI-PspI, RI-Sce, I-ScelV, I-Csml, I-Panl, I-Scell, I-Ppol, I-SceIII, I-Crel, I-Tevl, I-TevII and I-TevIII, whose recognition sequences are well-known (e.g., U.S. Pat. Nos. 5,420,032 and 6,833,252, Belfort et al. (1997) Nucl. Acids Res. 25:3379-3388, Dujon et al. (1989) Gene 52:115-118, Perler et al. (1994) Nucl. Acids Res. 22:1125-1127, Jasin (1996) Trends Genet. 72:224-228, Gimble et al. (1996) J. Mol. Biol. 263:163-180, and Argast et al. (1998) J. Mol. Biol. 280: 345-353).

[0227] In some embodiments, naturally-occurring meganucleases may be used to promote site-specific genome modification of a target selected from PD-1, LAG3, TIM3, CTLA4, TIGIT, an HLA-encoding gene, or a TCR component-encoding gene.

[0228] In other embodiments, an engineered meganuclease having a novel binding specificity for a target gene is used for site-specific genome modification (see, e.g., Porteus et al. (2005) Nat. Biotechnol. 23:967-73, Sussman et al. (2004) J. Mol. Biol. 342:31-41, Epinat et al. (2003) Nucl. Acids Res. 37:2952-2962, Chevalier et al. (2002) Mol. Cell 70:895-905, Ashworth et al. (2006) Nature 441:656-659, Paques et al. (2007) Curr. Gene Ther. 7:49-66, and U.S. Pat. Publ. Nos. US 2007/0117128, US 2006/0206949, US 2006/0153826, US 2006/0078552, and US 2004/0002092). In further embodiments, a chromosomal gene knockout is generated using a homing endonuclease that has been modified with modular DNA binding domains of TALENs to make a fusion protein known as a megaTAL. MegaTALs may be utilized to not only knock-out one or more target genes, but to also introduce (knock in) heterologous or exogenous polynucleotides when used in combination with an exogenous donor template encoding a polypeptide of interest In some embodiments, a chromosomal gene knockout comprises an inhibitory nucleic acid molecule that is introduced into a host cell (e.g., an immune cell) comprising a heterologous polynucleotide encoding an antigen-specific receptor that binds (e.g., specifically binding) to a SARS-CoV-2 associated antigen, wherein the inhibitory nucleic acid molecule encodes a target-specific inhibitor and wherein the encoded target-specific inhibitor inhibits endogenous gene expression (i.e., of PD-1, TIM3, LAG3, CTLA4, TIGIT, an HLA component, or a TCR component, or any combination thereof) in the host immune cell.

[0229] A chromosomal gene knockout may be confirmed directly by DNA sequencing of the host immune cell following use of the knockout procedure or agent.

[0230] Chromosomal gene knockouts may also be inferred from the absence of gene expression (e.g., the absence of an mRNA or polypeptide product encoded by the gene) following the knockout.

[0231] In some embodiments, a host cell encompassed by the present invention is capable of specifically killing 50% or more of target cells that comprise a peptide-MHC (pMHC) complex comprising a peptide epitope selected from Table 2 in the context of an MHC molecule.

[0232] In some embodiments, the modified immune cell is capable of producing a cytokine when contacted with target cells that comprise a peptide-MHC (pMHC) complex comprising a peptide epitope selected from Table 2 in the context of an MHC molecule.

[0233] In some embodiments, the cytokine comprises IFN-γ. In some embodiments, the cytokine comprises TNF-α.

[0234] In some embodiments, the host cell is capable of specifically killing a SARS-CoV-2-infected cell, wherein the SARS-CoV-2-infected cell expresses: (i) a polypeptide comprising or consisting of a peptide epitope selected from Tables 3; and (ii) a matched MHC molecule.

[0235] The present invention further provides a population of cells comprising at least one host cell described herein. The population of cells may be a heterogeneous population comprising the host cell comprising any of the recombinant expression vectors described, in addition to at least one other cell, e.g., a host cell (e.g., a T cell), which does not comprise any of the recombinant expression vectors, or a cell other than a T cell, e.g., a B cell, a macrophage, a neutrophil, an erythrocyte, a hepatocyte, an endothelial cell, an epithelial cells, a muscle cell, a brain cell, etc. Alternatively, the population of cells may be a substantially homogeneous population, in which the population comprises mainly of host cells (e.g., consisting essentially of) comprising the recombinant expression vector. The population also may be a clonal population of cells, in which all cells of the population are clones of a single host cell comprising a recombinant expression vector, such that all cells of the population comprise the recombinant expression vector. In one embodiment encompassed by the present invention, the population of cells is a clonal population comprising host cells comprising a recombinant expression vector as described herein.

[0236] In an embodiment encompassed by the present invention, the numbers of cells in the population may be rapidly expanded. Expansion of the numbers of T cells may be accomplished by any of a number of methods as are well-known in the art (e.g., U.S. Pat. Nos. 8,034,334 and 8,383,099, U.S. Pat. Publ. No. 2012/0244133, Dudley et al. (2003) J. Immunother. 26:332-242, and Riddell et al. (1990) J. Immunol. Methods 128:189-201). For example, expansion of the numbers of T cells may be carried out by culturing the T cells with OKT3 antibody, IL-2, and feeder PBMC (e.g., irradiated allogeneic PBMC).

### V. Pharmaceutical Compositions

[0237] In another aspect encompassed by the present invention, pharmaceutical compositions are provided herein comprising compositions described herein (e.g., binding proteins, nucleic acids, cells, and the like) and a pharmaceutically acceptable carrier, diluent, or excipient. Suitable excipients include water, saline, dextrose, glycerol, or the like and combinations thereof. In some embodiments, compositions comprising host cells, binding proteins, or fusion proteins as disclosed herein further comprise a suitable infusion media. Suitable infusion media may be any isotonic medium formulation, typically normal saline, Normosol™-R (Abbott) or Plasma-Lyte™ A (Baxter), 5% dextrose in water, Ringer's lactate may be utilized. An infusion medium may be supplemented with human serum albumin or other human serum components. Unit doses comprising an effective amount of a host cell, or composition are also contemplated.

[0238] Also provided herein are unit doses that comprise an effective amount of a host cell or of a composition comprising the host cell. As described herein, host cells include immune cells, T cells (CD4⁺ T cells and/or CD8+ T cells), cytotoxic lymphocytes (e.g., cytotoxic T cells and/or natural killer (NK) cells), and the like. For example, in some embodiments, a unit dose comprises a composition comprising at least about 30%, at least about 40%, at least about 50%, at least about 60%), at least about 70%, at least about 80%, at least about 85%, at least about 90%, or at least about 95% engineered cells, either alone or in combination with other cells, such as comprising at least about 30%, at least about 40%, at least about 50%, at least about 60%), at least about 70%, at least about 80%, at least about 85%, at least about 90%, or at least about 95% other cells. In some embodiments, undesired cells are present at a reduced amount or substantially not present, such as less than about 50%, less than about 40%, less than about 30%, less than about 20%, less than about 10%, less than about 5%, or less then about 1% the population of cells in the composition.

[0239] The amount of cells in a composition or unit dose is at least one cell (for example, at least one engineered CD8⁺ T cell, engineered CD4⁺ T cell, and/or NK cell) or is more typically greater than 10² cells, for example, up to 10⁶, up to 10⁷, up to 10⁸ cells, up to 10⁹ cells, or more than 10¹⁰ cells. In some embodiments, the cells are administered in a range from about 106 to about 10¹⁰ cells/m², such as in a range of about 10⁵ to about 10⁹ cells/M². The number of cells will depend upon the ultimate use for which the composition is intended as well the type of cells included therein. For example, cells modified to contain a binding protein specific for a particular antigen will comprise a cell population containing at least 30%, 35%, 40%, 45%, 50%, 55%, 60%, 65%, 70%, 75%, 80%, 85%, 90%, 95% or more of such cells. For uses provided herein, cells are generally in a volume of a liter or less, 500 ml or less, 250 ml or less, or 100 ml or less. In embodiments, the density of the desired cells is typically greater than 10⁴ cells/ml and generally is greater than 10⁷ cells/ml, generally 10⁸ cells/ml or greater. The cells may be administered as a single infusion or in multiple infusions over a range of time. A clinically relevant number of immune cells may be apportioned into multiple infusions that cumulatively equal or exceed 10⁶, 10⁷, 10⁸, 10⁹, 10¹⁰, or 10¹¹ cells. In some embodiments, a unit dose of the engineered immune cells may be co-administered with (e.g., simultaneously or contemporaneously) hematopoietic stem cells from an allogeneic donor.

[0240] Pharmaceutical compositions may be administered in a manner appropriate to the disease or condition to be treated (or prevented) as determined by persons skilled in the medical art. An appropriate dose and a suitable duration and frequency of administration of the compositions will be determined by such factors as the health condition of the patient, size of the patient (i.e., weight, mass, or body area), the type and severity of the patient's condition, the particular form of the active ingredient, and the method of administration. In general, an appropriate dose and treatment regimen provide the composition(s) in an amount sufficient to provide therapeutic and/or prophylactic benefit (such as described herein, including an improved clinical outcome, such as more frequent complete or partial remissions, or longer disease-free and/or overall survival, or a lessening of symptom severity).

[0241] An effective amount of a pharmaceutical composition refers to an amount sufficient, at dosages and for periods of time needed, to achieve the desired clinical results or beneficial treatment, as described herein. An effective amount may be delivered in one or more administrations. If the administration is to a subject already known or confirmed to have a disease or disease-state, the term “therapeutically effective amount” may be used in reference to treatment, whereas “prophylactically effective amount” may be used to describe administrating an effective amount to a subject that is susceptible or at risk of developing a disease or disease-state (e.g., recurrence) as a preventative course.

[0242] The pharmaceutical compositions described herein may be presented in unit-dose or multi-dose containers, such as sealed ampoules or vials. Such containers may be frozen to preserve the stability of the formulation until infusion into the patient. In some embodiments, a unit dose comprises an host cell as described herein at a dose of about 10⁷ cells/m² to about 10¹¹ cells/m². The development of suitable dosing and treatment regimens for using the particular compositions described herein in a variety of treatment regimens, including e.g., parenteral or intravenous administration or formulation.

[0243] If the subject composition is administered parenterally, the composition may also include sterile aqueous or oleaginous solution or suspension. Suitable non-toxic parenterally acceptable diluents or solvents include water, Ringer's solution, isotonic salt solution, 1,3-butanediol, ethanol, propylene glycol or polythethylene glycols in mixtures with water. Aqueous solutions or suspensions may further comprise one or more buffering agents, such as sodium acetate, sodium citrate, sodium borate or sodium tartrate. Of course, any material used in preparing any dosage unit formulation should be pharmaceutically pure and substantially non-toxic in the amounts employed. In addition, the active compounds may be incorporated into sustained-release preparation and formulations.

[0244] Dosage unit form, as used herein, refers to physically discrete units suited as unitary dosages for the subject to be treated; each unit may contain a predetermined quantity of engineered immune cells or active compound calculated to produce the desired effect in association with an appropriate pharmaceutical carrier.

[0245] In some embodiments, the pharmaceutical composition described, when administered to a subject, can elicit an immune response against a cell that is infected by SARS-CoV-2. Such pharmaceutical compositions may be useful as vaccines for prophylactic and/or therapeutic treatment of COVID-19.

[0246] In some embodiments, the pharmaceutical composition further comprises a physiologically acceptable adjuvant. In some embodiments, the adjuvant employed provides for increased immunogenicity of the pharmaceutical composition. Such a further immune response stimulating compound or adjuvant may be (i) admixed to the pharmaceutical composition in accordance with the present invention after reconstitution of the peptides and optional emulsification with an oil-based adjuvant as defined above, (ii) may be part of the reconstitution composition encompassed by the present invention defined above, (iii) may be physically linked to the peptide(s) to be reconstituted or (iv) may be administered separately to the subject, mammal or human, to be treated. The adjuvant may be one that provides for slow release of antigen (e.g., the adjuvant may be a liposome), or it may be an adjuvant that is immunogenic in its own right thereby functioning synergistically with antigens. For example, the adjuvant may be a known adjuvant or other substance that promotes antigen uptake, recruits immune system cells to the site of administration, or facilitates the immune activation of responding lymphoid cells. Adjuvants include, but are not limited to, immunomodulatory molecules (e.g., cytokines), oil and water emulsions, aluminum hydroxide, glucan, dextran sulfate, iron oxide, sodium alginate, bacto-adjuvant, synthetic polymers such as poly amino acids and co-polymers of amino acids, saponin, paraffin oil, and muramyl dipeptide. In some embodiments, the adjuvant is adjuvant 65, α-GalCer, aluminum phosphate, aluminum hydroxide, calcium phosphate, β-glucan peptide, CpG DNA, GM-CSF, GPI-0100, IFA, IFN-γ, IL-17, lipid A, lipopolysaccharide, Lipovant, Montanide™, N-acetyl-muramyl-L-alanyl-D-isoglutamine, pam3CSK4, quil A, trehalose dimycolate, or zymosan.

[0247] In some embodiments, the adjuvant is an immunomodulatory molecule. For example, the immunomodulatory molecule may be a recombinant protein cytokine, chemokine, or immunostimulatory agent or nucleic acid encoding cytokines, chemokines, or immunostimulatory agents designed to enhance the immunologic response.

[0248] Examples of immunomodulatory cytokines include interferons (e.g., IFNα, IFNβ and IFNγ), interleukins (e.g., IL-1, IL-2, IL-3, IL-4, IL-5, IL-6, IL-7, IL-8, IL-9, IL-10, IL-12, IL-17 and IL-20), tumor necrosis factors (e.g., TNFα and TNFβ), erythropoietin (EPO), FLT-3 ligand, gIp10, TCA-3, MCP-1, MIF, MIP-1alpha., MIP-1β, Rantes, macrophage colony stimulating factor (M-CSF), granulocyte colony stimulating factor (G-CSF), and granulocyte-macrophage colony stimulating factor (GM-CSF), as well as functional fragments of any of the foregoing.

[0249] In some embodiments, an immunomodulatory chemokine that binds to a chemokine receptor, i.e., a CXC, CC, C, or CX3C chemokine receptor, also may be included in the compositions provided here. Examples of chemokines include, but are not limited to, Mip1α, Mip-1β, Mip-3α (Larc), Mip-3β, Rantes, Hcc-1, Mpif-1, Mpif-2, Mcp-1, Mcp-2, Mcp-3, Mcp-4, Mcp-5, Eotaxin, Tarc, Elc, 1309, IL-8, Gcp-2 Gro-α, Gro-β, Gro-γ, Nap-2, Ena-78, Gcp-2, Ip-10, Mig, I-Tac, Sdf-1, and Bca-1 (Blc), as well as functional fragments of any of the foregoing.

[0250] In some embodiments, the composition comprises a binding protein (e.g., a TCR, an antigen-binding fragment of a TCR, a CAR, or a fusion protein comprising a TCR and an effector domain), a TCRα and/or TCRβ polypeptide described herein. In some embodiments, the composition comprises a nucleic acid encoding a binding protein, a TCRα and/or TCRβ polypeptide described herein, such as a DNA molecule encoding a binding protein, a TCRα and/or TCRβ polypeptide. In some embodiments, the composition comprises an expression vector comprising an open reading frame encoding a binding protein, a TCRα and/or TCRβ polypeptide.

[0251] When taken up by a cell (e.g., T cells, NK cells, etc.), a DNA molecule may be present in the cell as an extrachromosomal molecule and/or may integrate into the chromosome. DNA may be introduced into cells in the form of a plasmid which may remain as separate genetic material. Alternatively, linear DNAs that may integrate into the chromosome may be introduced into the cell. Optionally, when introducing DNA into a cell, reagents which promote DNA integration into chromosomes may be added.

### VI. Uses and Methods

[0252] The compositions described herein may be used in a variety of diagnostic, prognostic, and therapeutic applications. In any method described herein, such as a diagnostic method, prognostic method, therapeutic method, or combination thereof, all steps of the method can be performed by a single actor or, alternatively, by more than one actor. For example, diagnosis can be performed directly by the actor providing therapeutic treatment. Alternatively, a person providing a therapeutic agent can request that a diagnostic assay be performed. The diagnostician and/or the therapeutic interventionist can interpret the diagnostic assay results to determine a therapeutic strategy. Similarly, such alternative processes can apply to other assays, such as prognostic assays.

[0253] a. Diagnostic Methods

[0254] In an aspect encompassed by the present invention, provided herein are diagnostic methods for detecting the presence or absence of a SARS-CoV-2 antigen comprising a peptide epitope selected from Table 2 and/or SARS-CoV-2 infection, comprising detecting the presence or absence of said SARS-CoV-2 antigen in a sample by use of at least one binding protein, or at least one host cell described herein. In some embodiments, the method further comprising obtaining the sample (e.g., from a subject). In some embodiments, the at least one binding protein or the at least one host cell, forms a complex with a peptide epitope selected from Table 2 in the context of an MHC molecule, and the complex is detected in the form of fluorescence activated cell sorting (FACS), enzyme linked immunosorbent assay (ELISA), radioimmune assay (RIA), immunochemically, Western blot, or intracellular flow assay.

[0255] In an aspect encompassed by the present invention, provided herein are diagnostic methods for detecting the level of SARS-CoV-2 infection in a subject, comprising: a) contacting a sample obtained from the subject with at least one binding protein, at least one host cell, or a population of host cells described herein; and b) detecting the level of reactivity, wherein a higher level of reactivity compared to a control level indicates that the level of SARS-CoV-2 infection in the subject.

[0256] In some embodiments, the level of reactivity is indicated by T cell activation or effector function, such as, but not limited to, T cell proliferation, killing, or cytokine release. The control level may be a reference number or a level of a healthy subject who has no exposure to SARS-CoV-2.

[0257] A biological sample may be obtained from a subject for determining the presence and level of an immune response to a peptide antigen (e.g., a SARS-CoV-2 viral antigen) as described herein. A “biological sample” as used herein may be a blood sample (from which serum or plasma may be prepared), biopsy specimen, body fluids (e.g., lung lavage, ascites, mucosal washings, synovial fluid), bone marrow, lymph nodes, tissue explant, organ culture, or any other tissue or cell preparation from the subject or a biological source. Biological samples may also be obtained from the subject prior to receiving any pharmaceutical composition, which biological sample is useful as a control for establishing baseline data.

[0258] Antigen-specific T cell responses are typically determined by comparisons of observed T cell responses according to any of the herein described T cell functional parameters (e.g., proliferation, cytokine release, CTL activity, altered cell surface marker phenotype, etc.) that may be made between T cells that are exposed to a cognate antigen in an appropriate context (e.g., the antigen used to prime or activate the T cells, when presented by immunocompatible antigen-presenting cells) and T cells from the same source population that are exposed instead to a structurally distinct or irrelevant control antigen. A response to the cognate antigen that is greater, with statistical significance, than the response to the control antigen signifies antigen-specificity.

[0259] The level of a cytotoxic T lymphocyte (CTL) immune response may be determined by any one of numerous immunological methods described herein and routinely practiced in the art. The level of a CTL immune response may be determined prior to and following administration of any one of the herein described binding proteins expressed by, for example, a T cell. Cytotoxicity assays for determining CTL activity may be performed using any one of several techniques and methods routinely practiced in the art (e.g., Henkart el al., “Cytotoxic T-Lymphocytes” in Fundamental Immunology, Paul (ed.) (2003 Lippincott Williams & Wilkins, Philadelphia, PA), pages 1127-50, and references cited therein).

[0260] b. Therapeutic Methods

[0261] In an aspect encompassed by the present invention, provided herein are methods for preventing and/or treating COVID-19 (i.e., a SARS-CoV-2 infection), and/or for inducing an immune response against a SARS-CoV-2 protein or fragment thereof. In some embodiments, the method comprises administering to a subject a therapeutically effective amount of a composition comprising cells expressing at least one binding protein described herein.

[0262] The methods described herein may be used to treat a subject in need thereof. As used herein, a “subject in need thereof” includes any subject who has COVID-19, who has had COVID-19, and/or who is predisposed to COVID-19. For example, in some embodiments, the subject has a SARS-COV-2 infection. In some embodiments, the subject has a SARS-COV-2 infection and exhibits symptoms of COVID-19. In some embodiments, the subject has undergone treatment for COVID-19. In some embodiments, the subject is predisposed to COVID-19 due to age, or having a compromised immune system or other serious underlying medical conditions that predisposes the subject to COVID-19.

[0263] The pharmaceutical compositions disclosed herein may be delivered by any suitable route of administration, including parenterally. In some embodiments the pharmaceutical compositions are delivered generally (e.g., via parenteral administration). In specific embodiments, the pharmaceutical compositions is administered by infusion.

[0264] Actual dosage levels of the active ingredients in the pharmaceutical compositions may be varied so as to obtain an amount of the active ingredient which is effective to achieve the desired therapeutic response for a particular patient, composition, and mode of administration, without being toxic to the patient.

[0265] The selected dosage level will depend upon a variety of factors including the activity of the particular agent employed, the route of administration, the time of administration, the rate of excretion or metabolism of the particular agent being employed, the duration of the treatment, other drugs, compounds and/or materials used in combination with the particular agent employed, the age, sex, weight, condition, general health and prior medical history of the patient being treated, and like factors well-known in the medical arts.

[0266] A physician or veterinarian having ordinary skill in the art can readily determine and prescribe the effective amount of the pharmaceutical composition required. For example, the physician or veterinarian could prescribe and/or administer doses of the agents employed in the pharmaceutical composition at levels lower than that required in order to achieve the desired therapeutic effect and gradually increase the dosage until the desired effect is achieved.

[0267] In general, a suitable daily dose of an agent described herein will be that amount of the agent which is the lowest dose effective to produce a therapeutic effect Such an effective dose will generally depend upon the factors described above.

[0268] A pharmaceutical dosage unit may be an effective amount or part of an effective amount. An “effective amount” is to be understood herein as an amount or dose of active ingredients required to prevent and/or reduce the symptoms of a disease (e.g., COVID-19) relative to an untreated patient. The effective amount of active compound(s) used in accordance with the present invention for preventive and/or therapeutic treatment of COVID-19 varies depending upon the manner of administration, the age, body weight, and general health of the subject Ultimately, the attending physician or veterinarian will decide the appropriate amount and dosage regimen. Such amount is referred to as an “effective” amount. This effective amount may also be the amount that is able to induce an effective cellular T cell response in the subject to be treated, or more such as an effective systemic cellular T cell response.

[0269] In one aspect, provided herein is a method of eliciting in a subject an immune response to a cell that is infected with SARS-CoV-2 virus. In some embodiments, the method comprises administering to the subject a pharmaceutical composition described herein, wherein the pharmaceutical composition, when administered to the subject, elicits an immune response to the cell that is infected with SARS-CoV-2 virus.

[0270] In some embodiments, the immune response can include a cell-mediated immune response. A cellular immune response is a response that involves T cells and may be determined in vitro or in vivo. For example, a general cellular immune response may be determined as the T cell proliferative activity in cells (e.g., peripheral blood leukocytes (PBLs)) sampled from the subject at a suitable time following the administering of a pharmaceutical composition. Following incubation of e.g., PBMCs with a stimulator for an appropriate period, [³H]thymidine incorporation may be determined. The subset of T cells that is proliferating may be determined using flow cytometry.

[0271] In another aspect encompassed by the present invention, the methods provided herein include administering to both human and non-human mammals. Veterinary applications also are contemplated. In some embodiments, the subject may be any living organism in which an immune response may be elicited. Examples of subjects include, without limitation, humans, livestock, dogs, cats, mice, rats, and transgenic species thereof.

[0272] In some embodiments, the pharmaceutical composition may be administered at any time that is appropriate. For example, the administering may be conducted before or during treatment of a subject having a COVID-19, and continued after the SARS-CoV-2 infection becomes clinically undetectable. The administering also may be continued in a subject showing signs of recurrence.

[0273] In some embodiments, the pharmaceutical composition may be administered in a therapeutically or a prophylactically effective amount Administering the pharmaceutical composition to the subject may be carried out using known procedures, and at dosages and for periods of time sufficient to achieve a desired effect.

[0274] In some embodiments, the pharmaceutical composition may be administered to the subject at any suitable site. The route of administering may be parenteral, intramuscular, subcutaneous, intradermal, intraperitoneal, intranasal, intravenous (including via an indwelling catheter), via an afferent lymph vessel, or by any other route suitable in view of the subject's condition. In some embodiments, the dose may be administered in an amount and for a period of time effective in bringing about a desired response, be it eliciting the immune response or the prophylactic or therapeutic treatment of the SARS-CoV-2 infection and/or symptoms associated therewith.

[0275] The pharmaceutical composition may be given subsequent to, preceding, or contemporaneously with other therapies including therapies that also elicit an immune response in the subject. For example, the subject may previously or concurrently be treated by other forms of immunomodulatory agents, such other therapies may be provided in such a way so as not to interfere with the immunogenicity of the compositions described herein.

[0276] Administering may be properly timed by the care giver (e.g., physician, veterinarian), and may depend on the clinical condition of the subject, the objectives of administering, and/or other therapies also being contemplated or administered. In some embodiments, an initial dose may be administered, and the subject monitored for an immunological and/or clinical response. Suitable means of immunological monitoring include using patient's peripheral blood lymphocyte (PBL) as responders and immunogenic peptides or peptide-MHC complexes described herein as stimulators. An immunological reaction also may be determined by a delayed inflammatory response at the site of administering. One or more doses subsequent to the initial dose may be given as appropriate, typically on a monthly, semimonthly, or a weekly basis, until the desired effect is achieved. Thereafter, additional booster or maintenance doses may be given as required, particularly when the immunological or clinical benefit appears to subside.

[0277] In general, an appropriate dosage and treatment regimen provides the active molecules or cells in an amount sufficient to provide a benefit Such a response may be monitored by establishing an improved clinical outcome (e.g., more frequent remissions, complete or partial, or longer disease-free survival) in treated subjects as compared to non-treated subjects. Increases in preexisting immune responses to a viral protein generally correlate with an improved clinical outcome. Such immune responses may generally be evaluated using standard proliferation, cytotoxicity or cytokine assays, which are routine.

[0278] For prophylactic use, a dose should be sufficient to prevent, delay the onset of, or diminish the severity of a disease associated with disease or disorder. Prophylactic benefit of the immunogenic compositions administered according to the methods described herein can be determined by performing pre-clinical (including in vitro and in vivo animal studies) and clinical studies and analyzing data obtained therefrom by appropriate statistical, biological, and clinical methods and techniques, all of which can readily be practiced by an ordinarily skilled artisan.

[0279] As used herein, administration of a composition refers to delivering the same to a subject, regardless of the route or mode of delivery. Administration may be effected continuously or intermittently, and parenterally. Administration may be for treating a subject already confirmed as having a recognized condition, disease or disease state, or for treating a subject susceptible to or at risk of developing such a condition, disease or disease state. Co-administration with an adjunctive therapy may include simultaneous and/or sequential delivery of multiple agents in any order and on any dosing schedule (e.g., engineered immune cells with one or more cytokines; immunosuppressive therapy such as calcineurin inhibitors, corticosteroids, microtubule inhibitors, low dose of a mycophenolic acid prodrug, or any combination thereof).

[0280] In some embodiments, a plurality of doses of a host cell (e.g., an engineered immune cell) described herein is administered to the subject, which may be administered at intervals between administrations of about two to about four weeks.

[0281] Treatment or prevention methods encompassed by the present invention may be administered to a subject as part of a treatment course or regimen, which may comprise additional treatments prior to, or after, administration of the instantly disclosed unit doses, cells, or compositions. For example, in some embodiments, a subject receiving a unit dose of the host cell (e.g., an engineered immune cell) is receiving or had previously received a hematopoietic cell transplant (HCT; including myeloablative and non-myeloablative HCT). In any of the foregoing embodiments, a hematopoietic cell used in an HCT may be a “universal donor” cell that is modified to reduce or eliminate expression of one or more endogenous genes that encode a polypeptide product selected from an MHC, antigen, and a binding protein (e.g., by a chromosomal gene knockout according to the methods described herein).

[0282] Techniques and regimens for performing cell transplantation are known in the art and may comprise transplantation of any suitable donor cell, such as a cell derived from umbilical cord blood, bone marrow, or peripheral blood, a hematopoietic stem cell, a mobilized stem cell, or a cell from amniotic fluid. Accordingly, in some embodiments, a host cell (e.g., an engineered immune cell) encompassed by the present invention may be administered with or shortly after stem cell therapy.

[0283] Methods encompassed by the present invention may, in some embodiments, further include administering one or more additional agents to treat the disease or disorder (e.g., COVID-19) in a combination therapy. For example, in some embodiments, a combination therapy comprises administering host cell or binding protein encompassed by the present invention with (concurrently, simultaneously, or sequentially) an antiviral agent. In some embodiments, a combination therapy comprises administering a host cell or binding protein encompassed by the present invention with lopinavir/ritonavir, chloroquine, ribavirin, steroid drugs, hydroxychloroquine, and/or interferon α. In some embodiments, a combination therapy comprises administering a host cell, composition, or unit dose of the host cells encompassed by the present invention with a secondary therapy, such as a surgery, an antibody, a vaccine, or any combination thereof.

[0284] In some embodiments, the subject is a human, such as a human with COVID-19. In some embodiments, the subject is a rodent, such as a mouse. In some such embodiments, the mouse is a transgenic mouse, such as a mouse expressing human MIHC (i.e., HLA) molecules, such as HLA-A2 (e.g., Nicholson et al. (2012) Adv. Hematol. 2012:404081).

[0285] In some embodiments, the subject is a transgenic mouse expressing human TCRs or is an antigen-negative mouse (e.g., Li et al. (2010) Nat. Med. 16:1029-1034 and Obenaus et al. (2015) Nat. Biotechnol. 33:402-407). In some embodiments, the subject is atransgenic mouse expressing human HLA molecules and human TCRs.

[0286] In some embodiments, such as where the subject is a transgenic HLA mouse, the identified TCRs are modified, e.g., to be chimeric or humanized. In some embodiments, the TCR scaffold is modified, such as analogous to known binding protein humanizing methods.

[0287] c. Monitoring of Effects During Clinical Trials

[0288] Monitoring the influence of a SARS-CoV-2 therapy (e.g., compounds, drugs, vaccines, cell therapies, and the like) on immune responses, such as T cell reactivity (e.g., the presence of binding and/or T cell activation and/or effector function), may be applied not only in basic candidate SARS-CoV-2 antigen binding molecule screening, but also in clinical trials. For example, the effectiveness of binding proteins and related compositions described herein, such as nucleic acids, host cells, pharmaceutical formulations, and the like, to increase immune response (e.g., T cell immune response) against SARS-CoV-2 infection, may be monitored in clinical trials of subjects afflicted with COVID-19. In such clinical trials, the presence of binding and/or T cell activation and/or effector function (e.g., T cell proliferation, killing, and/or cytokine release), may be used as a “read out” or marker of the phenotype of a particular cell, tissue, or system. Similarly, the effectiveness of an adaptive T cell therapy with T cells engineered to express a binding protein (e.g., a TCR, an antigen-binding fragment of a TCR, a CAR, or a fusion protein comprising a TCR and an effector domain) as described herein to increase immune response to cells that are infected by SARS-CoV-2, may be monitored in clinical trials of subjects infected with SARS-CoV-2 either alone or in combination with COVID-19 affliction. In such clinical trials, the presence of binding and/or T cell activation and/or effector function (e.g., T cell proliferation, killing, or cytokine release), may be used as a “read out” or marker of the phenotype of a particular cell, tissue, or system.

[0289] In some embodiments, the present invention provides a method for monitoring the effectiveness of treatment of a subject with a SARS-CoV-2 therapy (e.g., compounds, drugs, vaccines, cell therapies, and the like) including the steps of a) determining the absence, presence, or level of reactivity between a sample obtained from the subject and one or more binding proteins or related composition, in a first sample obtained from the subject prior to providing at least a portion of the SARS-CoV-2 therapy to the subject, and b) determining the absence, presence, or level of reactivity between the one or more binding proteins or related composition, and a sample obtained from the subject present in a second sample obtained from the subject following provision of the portion of the SARS-CoV-2 therapy, wherein the presence or a higher level of reactivity in the second sample, relative to the first sample, is an indication that the therapy is efficacious for treating SARS-CoV-2 in the subject and wherein the absence or a lower level of reactivity in the second sample, relative to the first sample, is an indication that the therapy is not efficacious for treating SARS-CoV-2 in the subject.

[0290] For example, increased administration of the SARS-CoV-2 therapy may be desirable to increase the presence or level of reactivity between a sample obtained from the subject and one or more binding proteins or related composition, such as to increase the effectiveness of the SARS-CoV-2 therapy. According to such an embodiment, the presence or level of reactivity between a sample obtained from the subject and one or more binding proteins or related composition may be used as an indicator of the effectiveness of a SARS-CoV-2 therapy, even in the absence of an observable phenotypic response. Similarly, analysis of the presence or level of reactivity between a sample obtained from the subject and one or more binding proteins or related composition, such as by a direct binding assay, fluorescence activated cell sorting (FACS), enzyme linked immunosorbent assay (ELISA), radioimmune assay (RIA), immunochemically, Western blot, or intracellular flow assay, may also be used to select patients who will receive SARS-CoV-2 therapy.

[0291] For example, in a direct binding assay, immunogenic peptides or antigen peptide-MHC (pMHC) complexes may be coupled with a radioisotope or enzymatic label such that binding may be determined by detecting the labeled immunogenic peptides or pMHC complexes. For example, the immunogenic peptides or pMHC complexes may be labeled with ¹²⁵I, ³⁵S, ¹⁴C, or ³H, either directly or indirectly, and the radioisotope detected by direct counting of radioemission or by scintillation counting. Alternatively, the immunogenic peptides or pMHC complexes may be enzymatically labeled with, for example, horseradish peroxidase, alkaline phosphatase, or luciferase, and the enzymatic label detected by determination of conversion of an appropriate substrate to product Determining the interaction between immunogenic peptides or pMHC complexes and immune cells, such as T cells and/or NK cells, may also be accomplished using standard binding or enzymatic analysis assays. In one or more embodiments of the above described assay methods, it may be desirable to immobilize immunogenic peptides or pMHC complexes to accommodate automation of the assay.

[0292] Binding of immunogenic peptides or pMHC complexes to immune cells, such as T cells and/or NK cells, may be accomplished in any vessel suitable for containing the reactants. Non-limiting examples of such vessels include microtiter plates, test tubes, and micro-centrifuge tubes. Immobilized forms of the immunogenic peptides or pMHC complexes may also include immunogenic peptides or pMHC complexes bound to a solid phase like a porous, microporous (with an average pore diameter less than about one micron) or macroporous (with an average pore diameter of more than about 10 microns) material, such as a membrane, cellulose, nitrocellulose, or glass fibers; a bead, such as that made of agarose or polyacrylamide or latex; or a surface of a dish, plate, or well, such as one made of polystyrene.

[0293] In some embodiments, the reactivity of a sample obtained from the subject to one or more binding proteins or to one or more host cells described herein may be measured by detecting the presence of binding and/or T cell activation and/or effector function. The term “T cell activation” refers to T lymphocytes selected from proliferation, differentiation, cytokine secretion, release of cytotoxic effector molecules, cytotoxic activity, and expression of activation markers, particularly refers to one or more cellular responses of cytotoxic T lymphocytes.

[0294] Cytokine production and/or release may be measured by methods well-known in the art, for example, ELISA, enzyme-linked immune absorbent spot (ELISPOT), Luminex® assay, intracellular cytokine staining, and flow cytometry, and combinations thereof (e.g., intracellular cytokine staining and flow cytometry). It may be determined according to the method implemented.

[0295] The term “cytokine” as used herein refers to a molecule that mediates and/r regulates a biological or cellular function or process (e.g., immunity, inflammation, and hematopoiesis). The term “cytokine” as used herein includes “lymphokines”, “chemokines”, “monokines”, and “interleukins”. Examples of useful cytokines are GM-CSF, IL-1α, IL-1β, IL-2, IL-3, IL-4, IL-5, IL-6, IL-7, IL-8, IL-10, IL-12, IL-15, IFN-α, IFN-β, IFN-γ, MIP-1α, MIP-1β, TGF-β, TNF-α, and TNF-β.

[0296] The proliferation and clonal expansion of T cells resulting from antigen-specific induction or stimulation of an immune response may be determined, for example, through incorporation of a non-radioactive assay such as a tritiated thymidine assay or MTT assay.

[0297] Cytotoxicity assays to determine CTL activity may be performed using any one of several techniques and methods routinely practiced in the art (e.g., Henkart et al. (2003) Fund. Immunol. 1127-1150). Additional description of methods for measuring antigen-specific T cell reactivity can be found in, for example, U.S. Pat. No. 10,208,086 and U.S. Pat. Publ. No. 2017/0209573.

### VII. Cell Therapy

[0298] In another aspect encompassed by the present invention, the methods include adoptive cell therapy, whereby genetically engineered cells expressing the provided molecules targeting an MHC-restricted epitope (e.g., cells expressing a binding protein (e.g., a TCR or CAR) or antigen-binding fragment thereof) are administered to subjects. Such administration may promote activation of the cells (e.g., T cell activation) in an antigen-targeted manner, such that the cells infected with SARS-CoV-2 are targeted for destruction.

[0299] Thus, the provided methods and uses include methods and uses for adoptive cell therapy. In some embodiments, the methods include administration of the cells or a composition containing the cells to a subject, tissue, or cell, such as one having, at risk for, or suspected of having the disease, condition or disorder. In some embodiments, the cells, populations, and compositions are administered to a subject having the particular disease or condition to be treated (e.g., via adoptive cell therapy, such as by adoptive T cell therapy). In some embodiments, the cells or compositions are administered to the subject, such as a subject having or at risk for the disease or condition. In some embodiments, the methods thereby treat, e.g., ameliorate one or more symptom of the disease or condition.

[0300] Methods for administration of cells for adoptive cell therapy are known and may be used in connection with the provided methods and compositions (e.g., U.S. Pat. Publ. No. 2003/0170238, U.S. Pat. No. 4,690,915, Rosenberg (2011) Nat. Rev. Clin. Oncol. 8:577-585, Themeli et al. (2013) Nat. Biotechnol. 31:928-933, Tsukahara et al. (2013) Biochem. Biophys. Res. Commun. 438:84-89, and Davila et al. (2013) PLoS ONE 8:e61338).

[0301] In some embodiments, cell therapy (e.g., adoptive cell therapy, such as adoptive T cell therapy) may be carried out by autologous transfer, in which the cells are isolated and/or otherwise prepared from the subject who is to receive the cell therapy, or from a sample derived from such a subject. Thus, in some embodiments, the cells are derived from a subject, e.g., patient, in need of a treatment and the cells, following isolation and processing are administered to the same subject.

[0302] In some embodiments, the cell therapy (e.g., adoptive cell therapy, such as adoptive T cell therapy) may be carried out by allogeneic transfer, in which the cells are isolated and/or otherwise prepared from a subject other than a subject who is to receive or who ultimately receives the cell therapy, e.g., a first subject. In such embodiments, the cells then are administered to a different subject, e.g., a second subject, of the same species. In some embodiments, the first and second subjects are genetically identical (syngeneic). In some embodiments, the first and second subjects are genetically similar. In some embodiments, the second subject expresses the same HLA class or supertype as the first subject.

[0303] In some embodiments, the subject, to whom the cells, cell populations, or compositions are administered is a primate, such as a human. In some embodiments, the primate is a monkey or an ape. The subject may be male or female and may be any suitable age, including infant, juvenile, adolescent, adult, and geriatric subjects. In some embodiments, the subject is a non-primate mammal, such as a rodent. In some examples, the patient or subject is a validated animal model for disease, adoptive cell therapy, and/or for assessing toxic outcomes such as cytokine release syndrome (CRS).

[0304] The binding molecules, such as TCRs, antigen-binding fragments of TCRs (e.g., scTCRs) and chimeric receptors (e.g., CARs) containing the TCR, and cells expressing the same, may be administered by any suitable means, for example, by injection, e.g., intravenous or subcutaneous injections, intraocular injection, periocular injection, subretinal injection, intravitreal injection, trans-septal injection, subscleral injection, intrachoroidal injection, intracameral injection, subconjectval injection, subconjuntival injection, sub-Tenon's injection, retrobulbar injection, peribulbar injection, or posterior juxtascleral delivery. In some embodiments, they are administered by parenteral, intrapulmonary, and intranasal, and, if desired for local treatment, intralesional administration. Parenteral infusions include intramuscular, intravenous, intraarterial, intraperitoneal, or subcutaneous administration. Dosing and administration may depend in part on whether the administration is brief or chronic. Various dosing schedules include but are not limited to single or multiple administrations over various time-points, bolus administration, and pulse infusion.

[0305] For the prevention or treatment of disease, the appropriate dosage of the binding molecule or cell may depend on the type of disease to be treated, the type of binding molecule, the severity and course of the disease, whether the binding molecule is administered for preventive or therapeutic purposes, previous therapy, the patient's clinical history and response to the binding molecule, and the discretion of the attending physician. The compositions and molecules and cells are in some embodiments suitably administered to the patient at one time or over a series of treatments.

[0306] In some embodiments, the cells, or individual populations of sub-types of cells, may be administered to the subject at a range of about one million to about 100 billion cells and/or that amount of cells per kilogram of body weight, such as, e.g., 1 million to about 50 billion cells (e.g., about 5 million cells, about 25 million cells, about 500 million cells, about 1 billion cells, about 5 billion cells, about 20 billion cells, about 30 billion cells, about 40 billion cells, or a range defined by any two of the foregoing values), such as about 10 million to about 100 billion cells (e.g., about 20 million cells, about 30 million cells, about 40 million cells, about 60 million cells, about 70 million cells, about 80 million cells, about 90 million cells, about 10 billion cells, about 25 billion cells, about 50 billion cells, about 75 billion cells, about 90 billion cells, or a range defined by any two of the foregoing values), and in some cases about 100 million cells to about 50 billion cells (e.g., about 120 million cells, about 250 million cells, about 350 million cells, about 450 million cells, about 650 million cells, about 800 million cells, about 900 million cells, about 3 billion cells, about 30 billion cells, about 45 billion cells) or any value in between these ranges and/or per kilogram of body weight Dosages may vary depending on attributes particular to the disease or disorder and/or patient and/or other treatments.

[0307] In some embodiments, for example, where the subject is a human, the dose includes fewer than about 1×10⁸ total binding protein (e.g., TCR or CAR)-expressing cells, T cells, or peripheral blood mononuclear cells (PBMCs), e.g., in the range of about 1×10⁶ to 1×10⁸ such cells, such as 2×10⁶, 5×10⁶, 1×10⁷, 5×10⁷, or 1×10⁸ or total such cells, or the range between any two of the foregoing values.

[0308] In some embodiments, the cells or related compositions described herein, such as nucleic acids, host cells, pharmaceutical formulations, and the like, may be administered as part of a combination treatment, such as simultaneously with or sequentially with, in any order, another therapeutic intervention, such as another antibody or engineered cell or receptor or agent, such as a cytotoxic or therapeutic agent.

[0309] In some embodiments, the cells or related composition may be co-administered with one or more additional therapeutic agents or in connection with another therapeutic intervention, either simultaneously or sequentially in any order. In some contexts, the cells or related composition are co-administered with another therapy sufficiently close in time such that the cell populations enhance the effect of one or more additional therapeutic agents, or vice versa. In some embodiments, the cells or related composition are administered prior to the one or more additional therapeutic agents. In some embodiments, the cells or related composition are administered after to the one or more additional therapeutic agents.

[0310] In some embodiments, the biological activity of the cells or related composition is measured by any of a number of known methods once the cells or related composition are administered to a mammal (e.g., a human). Parameters to assess include specific binding of an engineered or natural T cell or other immune cell to antigen, in vivo, e.g., by imaging, or ex vivo, e.g., by ELISA or flow cytometry. In some embodiments, the ability of the cells to destroy target cells (cytotoxicity) may be measured using any suitable assay or method known in the art (e.g., Kochenderfer et al. (2009) J. Immunother. 32: 689-702 and Herman et al. (2004) J. Immunol. Meth. 285:25-40). In some embodiments, the biological activity of the cells also may be measured by assaying expression and/or secretion of certain cytokines, such as CD107a, IFNγ, IL-2, and TNF alpha. In some embodiments, the biological activity is measured by assessing clinical outcome, such as reduction in viral burden or load.

[0311] In some embodiments, cells are modified in any number of ways, such that their therapeutic or prophylactic efficacy is increased. For example, the binding protein (e.g., engineered TCR, CAR, or antigen-binding fragment thereof) expressed by the population may be conjugated either directly or indirectly through a linker to a targeting moiety. The practice of conjugating compounds to targeting moieties is well-known in the art (e.g., Wadwa et al. (1995) J Drug Targeting 3:111 and U.S. Pat. No. 5,087,616).

[0312] Immune cells, such as cytotoxic lymphocytes, may be obtained from any suitable source such as peripheral blood, spleen, and lymph nodes. The immune cells may be used as crude preparations or as partially purified or substantially purified preparations, which may be obtained by standard techniques, including, but not limited to, methods involving immunomagnetic or flow cytometry techniques using antibodies.

[0313] In another aspect encompassed by the present invention, provided herein is a method for eliciting an immune response to a cell that is infected by the SARS-CoV-2 virus, the method comprising administering to the subject cells described herein expressing a binding protein (e.g., engineered TCR, CAR, or antigen-binding fragment thereof) in effective amounts sufficient to elicit the immune response. In some embodiments, provided herein is a method for treatment or prophylaxis of COVID-19, the method comprising administering to the subject an effective amount of the cells described herein expressing a binding protein (e.g., engineered TCR, CAR, or antigen-binding fragment thereof). In one embodiment, the cells are administered systemically, such as by injection. Alternately, one may administer locally rather than systemically, for example, via injection directly into tissue, such as in a depot or sustained release formulation.

[0314] In some embodiments, the cells described herein expressing a binding protein (e.g., engineered TCR, CAR, or antigen-binding fragment thereof) may be used as active compounds in immunomodulating compositions for prophylactic or therapeutic treatment of COVID-19. In some embodiments, SARS-CoV-2-primed antigen-presenting cells may be used for generating lymphocytes (e.g., CD8⁺ T lymphocytes, CD4⁺ T lymphocytes, and/or B lymphocytes), for further use in adoptive transfer to the subject with the cells described herein expressing a binding protein (e.g., engineered TCR, CAR, or antigen-binding fragment thereof).

[0315] In some embodiments, the cells described herein expressing a binding protein (e.g., engineered TCR, CAR, or antigen-binding fragment thereof), either alone or in combination with the lymphocytes, may be administered to a subject for eliciting an immune response, particularly for eliciting an immune response to cells are infected by the SARS-CoV-2 virus.

[0316] As described above, single or multiple administrations of the cells described herein expressing a binding protein (e.g., engineered TCR, CAR, or antigen-binding fragment thereof) cells, either alone or in combination with the lymphocytes, may be carried out with cell numbers and treatment being selected by the care provider (e.g., physician). Similarly, the cells, either alone or in combination with lymphocytes, may be administered in a pharmaceutically acceptable carrier. Suitable carriers may be growth medium in which the cells were grown, or any suitable buffering medium such as phosphate buffered saline. Cells may be administered alone or as an adjunct therapy in conjunction with other therapeutics.

### VIII. Kits

[0317] The present invention also encompasses kits. For example, the kit may comprise binding proteins, nucleic acids or vectors comprising sequences encoding binding proteins, host cells comprising nucleic acids or vectors and/or expressing the binding proteins as described herein, stable MHC-peptide complexes, adjuvants, detection reagents, and combinations thereof, packaged in a suitable container and may further comprise instructions for using such reagents. The kit may also contain other components, such as administration tools packaged in a separate container.

[0318] The disclosure is further illustrated by the following examples which should not be construed as limiting.

### EXAMPLES

### Example 1: Materials and Methods for Examples 2 and 3

[0319] a. Sample Collection Design

[0320] The study was approved by local institutional review boards (IRBs) at participating sites. All donors were provided written consent. The study was conducted in accordance with the Declaration of Helsinki (1996), approved by the Atlantic Health System Institutional Review Board and the Ochsner Clinic Foundation institutional Review Board and registered at clinicaltrials.gov #NCT04397900. Patients who had recovered from COVID-19 were eligible for this study. They were required to be >18 years of age and have laboratory-confirmed diagnosis of COVID-19 using CDC or state health labs or at hospitals using an FDA Emergency Use Authorized molecular assay. Time since discontinuation of isolation was required to be >14 days and discontinuation of isolation followed CDC guidelines (accessed on Mar. 19, 2020) using either test-based or non-test-based criteria for patients either in home isolation or in isolation at hospitals. Patients were also required to have no anti-pyretic use for >17 days and be able to sign informed consent for blood draws for 4 tubes of whole blood with approximately 7.5 mL of blood per tube. Eligible patients were identified by the participating sites through advertising and direct contact. Case report forms did not contain identifying information. Samples were de-identified at the participating sites with an anonymous code assigned to each sample Anonymized blood samples were sent to TScan laboratories with limited demographic and clinical data. Demographics included age, gender and ethnicity. Clinical data included date of diagnosis, specifics of diagnostic testing, duration of symptoms and whether the patient required hospitalization, supplemental oxygen or ICU care/ventilator support. Comorbidities and current medications were also recorded.

[0321] b. Recruitment and Demographics

[0322] Convalescents who met eligibility criteria and consented to described procedures were enrolled and sampled from two sites, Atlantic Health (New Jersey, 51 samples) and Ochsner (New Orleans, 27 samples). These sites were key in treating patients from early epicenters of SARS-CoV-2 outbreaks. Recruitment materials clearly requested patients that had recovered from COVID-19 with the goal of designing effective vaccines and treatments for this indication. As of Jun. 9, 2020, 63 convalescent samples (47 Females, 16 Males) have been received from a variety of ethnic backgrounds with ages ranging from 21 to 76 years old. Average self-reported duration of symptoms was 18 days (1-80 days range) in females and 21 days (0-76 days range) in males. Hospitalizations made up ˜32% of total convalescent samples received, with 31% requiring oxygen and 5% placed on a ventilator.

[0323] c. Isolation of PBMCs and CD8 Memory T Cells

[0324] Blood samples were collected in four 10 mL VACUETTE® K2 EDTA vacutainer tubes (BD) and processed within 24-30 hours to PBMCs or CD8 memory T cells. Before processing, a 1 mL sample was removed and centrifuged at 500×g for 10 minutes to obtain plasma. To isolate PBMCs, blood samples were diluted with an equal volume of MACS® separation buffer (phosphate buffered saline, 0.5% bovine serum albumin, 2 mM EDTA), then layered onto lymphocyte separation media (Corning) and centrifuged at 1200×g for 20 minutes. The interface was removed and washed once with MACS® buffer before further processing or cryopreservation. Memory CD8+ T cells were isolated from PBMCs using MACS® microbead kits according to the manufacturer's instructions (Miltenyi). Following separation, purity was confirmed using antibodies to CD3 (APC-Cy7, HIT3a Biolegend), CD8 (AF647, SKi Biolegend), CD45RA (BV510, HI100 Biolegend), CD45RO (PE, UCHL1 Biolegend), and CD57 (Pacific Blue, HNK-1 Biolegend). Immediately following isolation, memory CD8+ T cells were expanded by co-culturing with 2×10⁷ mitomycin C-treated (50 ug/mL, 30 minutes) allogenic PBMCs in the presence of 0.1 ug/mL anti-CD3 (OKT3, ebioscience), 50 U/mL recombinant IL-2 (Peprotech), 5 ng/mL IL-7, and 5 ng/mL IL-15 (R&D Systems). After 10 days of expansion, the cells were collected and cryopreserved.

[0325] d. Library Design, Generation, and Cloning

[0326] All SARS-CoV-2 genomic sequences were obtained from the NCBI database on Mar. 15, 2020, encoding a total of 1,117 proteins. Additionally, full-genome coding sequences from SARS-CoV-1 (NC_004718.3), HCoV 229E (NC_002645.1), HCoV NL63 (NC_005831.2), HCoV OC43 (NC_006213.1) and HCoV HKU1 (NC_006577.2) were obtained from the NCBI viral database. Each protein encoded by these viral genomes was broken up into 61 amino acid (aa) fragments tiled every 20 aa, resulting in 4,278 unique protein tiles. As positive controls, 32 known antigenic peptides from CMV, EBV, and influenza (flu) were included (the CEF peptide pool, available at pubmed.ncbi.nlm.nih.gov/11792386/) in the context of two overlapping tiles with the surrounding viral sequence identified from the UniProt database, for a total of 64 protein tiles. The combined library of 4,342 protein fragments was reverse translated with 10 unique nucleotide sequences each to serve as internal replicates, for a total of 42,780 oligonucleotide sequences. All protein fragments were reverse translated with ten unique nucleotide sequences each, synthesized on a releasable microarray (Agilent), and cloned into the pHAGE™ CMV NFlagHA DEST vector.

[0327] e. Generation of Reporter Cells

[0328] MHC-null HEK293T reporter cells, as described in Kula et al. (2019) Cell 178:P1016-P1028, were transduced to express one of each of the top nine most frequently occurring HLA alleles. Each reporter line was then transduced to express the COVID library described above. Library cells were maintained in culture at 1,500×representation of the antigen library until seeded for TScan screen co-culture.

[0329] f. Screen Co-Culture

[0330] To stimulate T cells for antigen screens, 1.5×10⁷ CD8 memory T cells were thawed and re-stimulated as above by co-culturing with 3×10⁸ mitomycin C-treated (50 ug/mL, 30 minutes) allogenic PBMCs in the presence of 0.1 ug/mL anti-CD3 (OKT3, ebioscience), 50 U/mL recombinant IL-2 (Peprotech), 5 ng/mL IL-7 and 5 ng/mL IL-15 (R&D Systems). After expansion for 7 days, the T cells were added to library transduced reporter cell at an effector to target ratio of 1.25:1 and incubated at 37° C. for 4 hours.

[0331] g. Cell Sorting

[0332] After incubation, cells were harvested by trypsinization and labeled with Annexin V magnetic microbeads (Miltenyi) according to the manufacturer's instructions. Annexin-labeled cells were isolated using an AutoMACS Pro (Miltenyi). The antigen-expressing cells targeted by T cell killing sorted using a MoFlo® Astrios EQ cell sorter (Beckman Coulter). Cells that were IFP-positive, indicative of being recognized by T cells due to COVID antigen, were collected for antigen-expression cassette sequencing and subsequent enrichment analysis.

[0333] h. HLA Typing of Patient Samples

[0334] Genomic DNA was extracted from sorted cells, such as 2×10⁶ patient cells, using the GeneJET™ genomic DNA purification kit (Thermo Scientific). Both type I and II HLA loci were amplified and Next Generation Sequencing libraries were prepared using the TruSight® HLA kit from CareDx. A pool of 24 samples were sequenced on Illumina MiSeq® sequencer with 150×2 cycles to get around 200×coverage of each locus. Sequence data were then analyzed using Assign TruSight® HLA v2.1 software to get the HLA typing information for each patient.

[0335] i. COVID Peptidome Library Cloning and Lentivirus Packaging

[0336] COVID peptidome library was synthesized as 213-mer oligos by Agilent. 1 ng of oligos were PCR amplified and cloned into EcoRI site of pHAGE-CMV-n-FHA-IRES-puro vector using Gibson Assembly. Lentivirus of the library was packaged in Lenti-X cells and concentrated 100× for downstream reporter cell transduction.

[0337] j. Screen Sample Processing and Sequencing

[0338] Genomic DNA extraction and next generation sequencing library preparation was done following a standard TScan screen protocol. Libraries of input sample and sorted samples were pooled and sequenced on Illumina MiSeq® sequencer. Reads were mapped to the designed COVID peptidome library to get the counts for each peptide. Specifically, genomic DNA (gDNA) was extracted from sorted cells using the GeneJET™ genomic DNA purification kit (Thermo Scientific). Samples were then subjected to 2 rounds of PCR. In the first round, primers amplified the antigen cassette from the extracted gDNA. Following PCR purification using AMPure™ XP beads, the second round of PCR added sequencing adaptors and sample-specific index sequences to the amplicon. Samples were then purified using AMPure™ XP beads, and pooled to equal quantities of DNA. Amplicons were sequenced on either an Illumina MiSeq® or Illumina NextSeq® sequencer using the standard Illumina sequencing primer. A 150-cycle kit was used for either instrument, and sequencing was performed with read lengths: 110 bp read 1, 8 bp-i7 index, 8 bp-i5 index.

[0339] k. Data Analysis

[0340] The abundance of each peptide in the sorted screen sample was compared to the abundance in the original input library to calculate an enrichment score. Next, the peptide sequences were ranked based on their enrichment across the independent nucleotide barcodes or the screen replicates for each sample. To harness the TScan screen data and delineate the specific MHC-binding epitopes within each fragment, a maximum parsimony approach was applied. For each recognized protein fragment, the NetMHC algorithm was used to identify all predicted candidate MHC-binding epitopes. Next, the collective performance of all of the protein fragments in the library that contained each candidate epitope was analyzed. Finally, the minimum number of high-affinity binding epitopes that could account for the screen results was selected. These epitopes were found in the fragments that enriched, but were absent from fragments that failed to enrich. In this way, the redundancy in the library was leveraged along with what is known about MHC binding to robustly map specific peptide epitopes recognized by each patient.

[0341] Nucleotide sequences were mapped to individual nucleotide tiles and read counts for each library entity representing identical amino acid tiles were summed. The proportion of read counts for each tile was calculated for each screen replicate (n=4) and for the input for each pool of transduced reporter cells, and enrichments of each tile were calculated by dividing the proportion of the tile in the screen replicate by the proportion of the tile in the input library. A modified geometric mean of the enrichment of an identical tile across the 4 screen replicates (calculated by adding 0.1 to all enrichment values and taking the geometric mean) and was used to identify reproducible screen hits. Specific MHC-binding epitopes for each tile above the threshold of 2-fold enrichment were predicted using NetMHC4.0. Candidate epitopes for each tile were selected by identifying predicted strong binding epitopes shared across overlapping adjacent and redundant tiles that were enriched in the screen. To collapse data from multiple tiles into a single datapoint for each patient, the arithmetic mean of all the tiles containing the indicated epitope was calculated.

[0342] l. Peptide Validation Assay

[0343] 5×10⁴ monomeric MHC reporter cells were seeded into 96-well plates and rested for 16 hours, then pulsed with 1 ug/mL of individual peptides (Genscript) for 1 hour. Bulk isolated CD8+ memory T cells were thawed, washed with warm media, added to the plates at a 2:1 effector to target cell ratio, and incubated for 16 hours. The cells were harvested by pipetting, transferred to V-bottom 96-well plates and centrifuged at 500×g for 2 minutes. The supernatant was removed and IFNγ was immediately measured using an Ella human IFNγ 3^{rd} generation single-plex assay (Protein Simple) following the manufacturer's instructions. The remaining cell pellets were washed with FACS buffer (phosphate buffered saline, 0.5% bovine serum albumin, 2 mM EDTA) and stained with PE-conjugated anti-CD137 (Miltenyi), AF647-conjugated anti-CD69 (Biolegend), and BV421-conjugated anti-CD8 (Biolegend) antibodies and analyzed by flow cytometry (Cytoflex S, Beckman Coulter).

[0344] m. Tetramer Staining

[0345] MHC tetramers were generated by incubating each peptide with PE- or APC-conjugated empty A*02:01 tetramers (Tetramer Shop) at a final peptide concentration of 30 ug/mL for 30 minutes at room temperature. Two tetramer-peptide reagents with contrasting fluorophore conjugates were used in each stain cocktail at a dilution of 1:10 in FACS buffer. Bulk isolated memory CD8+ T cells were thawed, washed with warm media, and plated in V-bottom 96-well plates at 1×10⁶ cells/well. Cells were pelleted and resuspended in the tetramer stain cocktail and incubated at 37° C. for 15 minutes prior to adding a BV421-conjugated anti-human TCR antibody (Biolegend) and incubating for an additional 15 minutes at room temperature. The stained cells were pelleted and washed three times before resuspending in a 5 ug/mL DAPI solution and analyzed by flow cytometry (Cytoflex S, Beckman Coulter). The limit of detection was defined as the mean+2 SD of the frequency of three MHC-mismatched controls.

[0346] n. Single Cell TCR Sequencing

[0347] Single-cell TCR-seq (scTCR-seq) libraries were prepared following the 10× Genomics Single Cell V(D)J Reagent Kit (v1) protocol. Briefly, cells were captured in droplets before undergoing reverse transcription. Following cDNA purification, cDNA was amplified (98° C. for 45 sec; 16 cycles of 98° C. for 20 sec, 67° C. for 30 sec, 72° C. for 1 min; 72° C. for 1 min). Following sample purification, 2 uL of each library was used for TCR sequence enrichment. TCR enriched libraries were subsequently fragmented, end-repaired, and amplified with indexing primers. The scTCR-seq libraries were sequenced on an Illumina NextSeq™ using a High Output v2.5 kit (150 cycles) with read lengths: 26 bp-read 1, 8 bp-i7 index, 98 bp-read 2.

[0348] scTCR-seq reads were processed using Cellranger 3.1.0. Reads were aligned to the GRCh38 reference genome, Cellranger vdj was used to annotate TCR consensus sequences.

### Example 2: Identification of Highly Immunodominant Peptides for SARS-CoV-2

[0349] As described below, the following peptides were identified herein as representing SARS-CoV-2 immunodominant peptides.

TABLE 2
SARS-COV-2 immunodominant peptides grouped
according to MHC
Table 2A (HLA-A02)

| | Derived From SARS-COV-2 |
|---|---|
| Peptide Epitopes | Protein |
| ALWEIQQVV | ORF1ab |
| YLQPRTFLLK | S |
| SALWEIQQVV | ORF1ab |
| ATYYLFDESGEFKL | ORF1ab |
| PLLYDANYFL | ORF3a |
| LLYDANYFL | ORF3a |
| RLANECAQV | ORF1ab |
| QLSSYSLFDM | ORF1ab |
| YLFDESGEFKL | ORF1ab |
| FLIVAAIVFI | ORF7a |
| YANSVFNI | ORF1ab |
| FLCWHTNCYDYCI | ORF3a |
| SMWALIISV | ORF1ab |
| LLLDRLNQL | N |
| FAFACPDGV | ORF7a |
| YRLANECAQV | ORF1ab |
| GYLQPRTFLL | S |
| YLQPRTFLL | S |
| KLWAQCVQL | ORF1ab |
| ALWEIQQV | ORF1ab |
| ALDQAISMWA | ORF1ab |
| SLFDMSKFPL | ORF1ab |
| LLAKDTTEA | ORF1ab |
| MDLFMRIFTI | ORF3a |
| KILGLPTQTV | ORF1ab |
| SLQTYVTQQL | S |
| ALSKGVHFV | ORF3a |
| VMCGGSLYV | ORF1ab |
| TYASALWEIQQVV | ORF1ab |
| LLYDANYFLC | ORF3a |
| FDMSKFPLKL | ORF1ab |
| TYYLFDESGEFKL | ORF1ab |
| YSLFDMSKFPL | ORF1ab |
| YASALWEIQQVV | ORF1ab |
| FLLKYNENGTI | S |
| FTYASALWEI | ORF1ab |
| YYLFDESGEFKL | ORF1ab |
| RLWLCWKCRSKNPL | ORF3a |

Table 2B (HLA-A03)

| | Derived |
|---|---|
| Peptide Epitopes | From SARS-COV-2 Protein |
| TVIEVQGYK | ORF1ab |
| QIAPGQTGK | S |
| MMVTNNTFTLK | ORF1ab |
| RLFRKSNLK | S |
| YNSASFSTFK | S |
| VTNNTFTLK | ORF1ab |
| RQIAPGQTGK | S |
| KLFDRYFKY | ORF1ab |
| KTIQPRVEK | ORF1ab |
| CVADYSVLY | S |
| RLKLFDRYFK | ORF1ab |
| KTFPPTEPK | N |
| STFKCYGVSPTK | S |
| KCYGVSPTK | S |
| VLYNSASFSTFK | S |
| MVTNNTFTLK | ORF1ab |
| KTFPPTEPKK | N |
| KLFDRYFK | ORF1ab |
| QLPQGTTLPK | N |

Table 2C (HLA-A01)

| | Derived From SARS-COV-2 |
|---|---|
| Peptide Epitopes | Protein |
| VPTDNYITTY | ORF1ab |
| FTSDYYQLYS | ORF3a |
| CTDDNALAY | ORF1ab |
| SSPDDQIGYY | N |
| HTTDPSFLGRY | ORF1ab |
| TACTDDNALAYY | ORF1ab |
| TDDNALAY | ORF1ab |
| GTDLEGNFY | ORF1ab |
| PTDNYITTY | ORF1ab |
| TCDGTTFTY | ORF1ab |
| SMDNSPNLA | ORF1ab |
| YHTTDPSFLGRY | ORF1ab |
| LTTAAKLMVVIPDY | ORF1ab |
| VDTDFVNEFY | ORF1ab |
| ACTDDNALAYY | ORF1ab |
| FTSDYYQLY | ORF3a |
| YFTSDYYQLY | ORF3a |
| DTDFVNEFY | ORF1ab |
| SSDNIALLV | M |
| CTDDNALAYY | ORF1ab |
| TTDPSFLGRY | ORF1ab |
| LSPRWYFYY | N |
| YYHTTDPSFLGRY | ORF1ab |
| EYYHTTDPSFLGRY | ORF1ab |
| TSDYYQLY | ORF3a |
| ACTDDNALAY | ORF1ab |
| VATSRTLSYY | M |
| ATSRTLSYY | M |
| NTCDGTTFTY | ORF1ab |

Table 2D (HLA-A11)

| | Derived From SARS-COV-2 |
|---|---|
| Peptide Epitopes | Protein |
| VTDTPKGPK | ORF1ab |
| VTNNTFTLK | ORF1ab |
| TVATSRTLSYYK | M |
| ASAFFGMSR | N |
| LIRQGTDYK | N |
| LLNKHIDAYK | N |
| AVILRGHLR | M |
| QDLKWARFPK | ORF1ab |
| VTLACFVLAAVYR | M |
| KVKYLYFIK | ORF1ab |
| STMTNRQFHQKLLK | ORF1ab |
| KTFPPTEPK | N |
| QQQGQTVTK | N |
| ATSRTLSYYK | M |
| ATEGALNTPK | N |
| KSAAEASKK | N |
| KAYNVTQAFGR | N |

Table 2E (HLA-A24)

| | Derived From SARS-COV-2 |
|---|---|
| Peptide Epitopes | Protein |
| QYIKWPWYI | S |
| VYIGDPAQL | ORF1ab |
| VYFLQSINF | ORF3a |
| YYRRATRRI | N |
| RWYFYYLGTG | N |
| QYIKWPWYIW | S |
| KYEQYIKWPW | S |
| KWPWYIWLGF | S |
| LYLYALVYF | ORF3a |
| LYALVYFLQSINFV | ORF3a |
| YLYALVYFLQSINF | ORF3a |
| QYIKWPWYIWLGF | S |
| LYALVYFLQSINF | ORF3a |

Table 2F (HLA-B07)

| | Derived From SARS-COV-2 |
|---|---|
| Peptide Epitopes | Protein |
| SPRWYFYYLG | N |
| IPRRNVATL | ORF1ab |
| RPDTRYVL | ORF1ab |
| SPRWYFYYL | N |
| RPDTRYVLM | ORF1ab |
| IPRRNVATLQ | ORF1ab |
| EIPRRNVATL | ORF1ab |
| PRWYFYYL | N |
| LSPRWYFYYL | N |
| RIRGGDGKM | N |
| SLEIPRRNVATLQA | ORF1ab |

[0350] T cells play a critical role to control acute viral infection and provide durable immune protection from subsequent exposures. In the case of SARS-CoV-2, virus-reactive T cells have been reported, but the specific peptide targets recognized by these T cells remain unknown. A systematic, comprehensive survey was undertaken to map the precise T cell targets recognized by convalescent COVID-19 patients. Table 3 shows HLA alleles corresponding to patient samples analyzed.

TABLE 3

| Sample | HLA-A | | HLA-B | | HLA-C | | DPA1 |
|---|---|---|---|---|---|---|---|
| cov-1 | A*02:01:01 | A*23:01:01 | B*49:01:01 | B*50:01:01 | C*06:02:01 | C*07:01:01 | DPA1*01:03:01 |
| 01-01-002 | A*24:02:01 | A*32:01:01 | B*15:17:01 | B*35:03:01 | C*07:01:02 | C*12:03:01 | DPA1*01:03:01 |
| 01-01-003 | A*01:01:01 | A*11:01:01 | B*40:02:01 | B*57:01:01 | C*02:02:02 | C*06:02:01 | DPA1*01:03:01 |
| 01-01-004 | A*02:01:01 | A*74:01:01 | B*15:03:01 | B*35:12:01 | C*02:10:01 | C*04:01:01 | DPA1*01:03:01 |
| 01-01-005 | A*01:01:01 | A*32:01:01 | B*08:01:01 | B*35:189 | C*04:01:01 | C*07:01:01 | DPA1*01:03:01 |
| 01-01-006 | A*03:01:01 | A*24:02:01 | B*18:01:01 | B*35:01:01 | C*04:01:01 | C*07:01:01 | DPA1*01:03:01 |
| 01-01-007 | A*01:01:01 | A*02:01:01 | B*07:04 | B*08:01:01 | C*07:01:01 | C*07:02:01 | DPA1*01:03:01 |
| 01-01-008 | A*02:01:01 | A*03:01:01 | ? | ? | C*03:03:01 | C*12:03:01 | DPA1*01:03:01 |
| 01-01-009 | A*01:01:01 | X | B*37:01:01 | B*57:01:01 | C*06:02:01 | X | ? |
| 01-01-010 | A*01:01:01 | A*24:02:01 | B*49:01:01 | X | C*07:01:01 | X | DPA1*01:03:01 |
| 01-01-011 | A*24:02:01 | X | B*18:01:01 | B*35:03:01 | C*04:01:01 | C*05:01:01 | DPA1*01:03:01 |
| 01-01-012 | ? | ? | B*15:01:01 | B*40:01:02 | C*03:03:01 | C*03:04:01 | DPA1*01:03:01 |
| 01-01-013 | A*24:02:01 | A*26:01:01 | B*15:01:01 | B*40:01:02 | C*03:03:01 | C*03:04:01 | DPA1*01:03:01 |
| 01-01-014 | A*02:05:01 | A*30:04:01 | B*35:03:01 | B*51:01:01 | C*04:01:01 | C*16:01:01 | DPA1*01:03:01 |
| 01-01-015 | A*02:01:01 | A*24:02:01 | B*18:01:01 | B*25:03:01 | C*04:01:01 | C*07:01:01 | DPA1*01:03:01 |
| 01-01-016 | A*02:01:01 | A*32:01:01 | B*18:01:01 | B*50:01:01 | C*06:02:01 | C*12:03:01 | DPA1*01:03:01 |
| 01-02-001 | A*29:02:01 | A*30:02:01 | B*51:01:01 | B*57:01:01 | C*02:10:01 | C*16:01:01 | DPA1*02:01:08 |
| 01-02-002 | A*03:01:01 | A*23:01:01 | B*07:02:01 | B*49:01:01 | C*07:01:01 | C*07:02:01 | DPA1*01:03:01 |
| 01-02-003 | A*26:01:01 | A*33:01:01 | B*14:02:01 | B*38:01:01 | C*08:02:01 | C*12:03:01 | DPA1*01:03:01 |
| 01-02-004 | A*03:01:01 | X | B*07:02:01 | B*14:02:01 | C*07:02:01 | C*08:02:01 | DPA1*01:03:01 |
| 01-02-005 | A*02:01:01 | X | B*41:02:01 | B*44:02:01 | C*05:01:01 | C*17:03 | DPA1*01:03:01 |
| 01-02-006 | A*02:01:01 | A*25:01:01 | B*15:01:01 | B*44:03:01 | C*03:03:01 | C*16:01:01 | DPA1*01:03:01 |
| 01-02-007 | A*11:01:01 | A*24:02:01 | B*38:02:01 | X | C*07:02:01 | C*07:27:01 | DPA1*02:02:02 |
| 01-02-008 | A*02:01:01 | A*11:01:01 | B*44:02:01 | B*52:01:01 | C*03:04:01 | C*12:02:02 | ? |
| 01-01-007 | A*11:01:01 | A*29:02:01 | B*44:03:01 | B*51:01:01 | C*04:01:01 | C*16:01:01 | DPA1*01:03:01 |
| 01-01-008 | A*24:02:01 | A*26:01:01 | B*35:01:01 | B*55:01:01 | C*01:02:01 | C*04:01:01 | DPA1*01:03:01 |
| 01-01-009 | A*03:01:01 | A*11:01:01 | B*35:03:01 | B*51:01:01 | C*12:03:01 | C*14:02:01 | DPA1*01:03:01 |
| 01-01-020 | A*02:01:01 | A*03:01:01 | B*07:02:01 | B*27:02:01 | C*02:02:02 | C*07:02:01 | DPA1*01:03:01 |
| 01-01-021 | A*03:01:01 | A*30:01:01 | B*07:02:01 | B*13:02:01 | C*06:02:01 | C*07:02:01 | DPA1*01:03:01 |
| 01-01-022 | A*03:01:01 | A*33:03:01 | B*07:02:01 | B*58:01:01 | C*03:02:02 | C*07:02:01 | DPA1*01:03:01 |
| 01-01-023 | A*11:01:01 | A*68:01:01 | B*35:01:01 | B*51:01:01 | C*04:01:01 | C*15:04:01 | DPA1*01:03:01 |
| 01-01-024 | A*24:02:01 | A*33:03:01 | B*35:01:01 | B*40:01:02 | C*03:04:01 | C*04:01:01 | DPA1*01:03:01 |
| 01-01-025 | A*01:01:01 | A*02:01:01 | B*08:01:01 | B*39:06:02 | C*07:01:01 | C*07:02:01 | DPA1*01:03:01 |
| 01-01-026 | A*02:120 | A*32:01:01 | B*07:02:01 | B*18:01:01 | C*07:02:01 | C*12:03:01 | DPA1*01:03:01 |
| 01-01-027 | A*01:01:01 | A*03:01:01 | B*39:06:02 | B*56:01:01 | C*01:02:01 | C*07:02:01 | DPA1*01:03:01 |
| 01-01-028 | A*01:01:01 | A*68:02:01 | B*15:17:01 | B*57:01:01 | C*06:02:01 | C*07:01:02 | DPA1*01:03:01 |
| 01-01-029 | A*02:01:01 | A*33:01:01 | B*14:02:01 | B*15:01:01 | C*03:04:01 | C*08:02:01 | DPA1*01:03:01 |
| 01-01-030 | A*01:01:01 | A*24:02:01 | B*07:02:01 | B*08:01:01 | C*07:01:01 | C*07:02:01 | DPA1*01:03:01 |
| 01-01-031 | A*03:01:01 | A*24:02:01 | B*35:03:01 | B*39:06:02 | C*04:01:01 | C*07:02:01 | DPA1*01:03:01 |
| 01-01-032 | A*02:01:01 | A*66:01:01 | B*41:02:01 | B*51:01:01 | C*02:02:02 | C*17:03 | DPA1*01:03:01 |
| 01-01-033 | A*02:01:01 | A*24:02:01 | B*44:03:01 | B*50:01:01 | C*06:02:01 | C*16:01:01 | DPA1*02:01:01 |
| 01-01-034 | A*01:01:01 | A*11:01:01 | B*18:0:01 | B*35:01:01 | C*04:01:01 | C*07:01:01 | DPA1*01:03:01 |
| 01-01-035 | A*02:01:01 | A*30:01:01 | B*13:02:01 | B*35:02:01 | C*04:01:01 | C*06:02:01 | DPA1*01:03:01 |
| 01-01-036 | A*01:01:01 | A*23:01:01 | B*49:01:01 | B*52:01:01 | C*07:01:01 | C*12:02:02 | DPA1*01:03:01 |
| 01-01-037 | A*02:01:01 | X | B*07:02:01 | B*13:02:01 | C*06:02:01 | C*07:02:01 | DPA1*01:03:01 |
| 01-01-038 | A*02:01:01 | X | B*18:01:01 | B*49:01:01 | C*07:01:01 | X | DPA1*01:03:01 |
| 01-01-039 | A*01:01:01 | A*11:01:01 | B*35:01:01 | B*57:01:01 | C*04:01:01 | C*06:02:01 | DPA1*01:03:01 |
| 01-02-009 | A*01:01:01 | A*24:02:13 | B*40:06:01 | B*44:03:02 | C*07:06 | C*15:02:01 | |
| 01-02-010 | A*03:01:01 | A*23:01:01 | B*15:17:01 | B*53:01:01 | C*06:02:01 | C*16:01:01 | DPA1*02:01:08 |
| 01-02-011 | A*02:02:01 | A*30:02:01 | B*15:16:01 | B*42:01:01 | C*14:02:01 | C*17:01:01 | |
| 01-02-012 | A*01:01:01 | A*11:01:01 | B*35:01:01 | B*35:03:01 | C*04:01:01 | X | DPA1*01:03:01 |
| 01-02-013 | A*24:02:01 | A*29:02:01 | B*14:02:01 | B*44:03:01 | C*02:02:02 | C*16:01:01 | DPA1*01:03:01 |
| 01-02-014 | A*30:01:01 | A*74:01:01 | B*15:03:01 | B*42:01:01 | C*02:10:01 | C*17:01:01 | DPA1*02:01:01 |
| 01-02-015 | A*02:01:01 | A*31:01:02 | B*35:01:01 | B*48:01:01 | C*04:01:01 | C*08:03:01 | DPA1*01:03:01 |
| 01-02-016 | A*30:02:01 | A*33:03:01 | B*15:03:01 | B*57:02:01 | C*02:10:01 | C*18:02 | DPA1*02:01:01 |
| 01-02-017 | A*02:01:01 | A*29:02:01 | B*13:02:01 | B*40:01:02 | C*03:04:01 | C*6:02:01 | DPA1*01:03:01 |
| 01-02-018 | A*33:03:01 | A*68:02:01 | B*13:02:01 | B*44:03:01 | C*06:02:01 | X | DPA1*02:02:02 |
| 01-02-019 | A*01:01:01 | A*02:01:01 | B*40:01:02 | B*57:01:01 | C*03:04:01 | C*06:02:01 | DPA1*01:03:01 |
| 01-02-020 | A*30:01:01 | A*22:01:01 | B*42:01:01 | B*44:02:01 | C*05:01:01 | C*17:01:01 | DPA1*01:03:01 |
| 01-02-021 | A*02:01:01 | X | B*15:01:01 | B*57:01:01 | C*03:03:01 | C*06:02:01 | DPA1*01:03:01 |
| 01-02-022 | A*02:01:01 | X | B*40:01:02 | B*56:01:01 | C*01:02:01 | C*03:04:01 | DPA1*01:03:01 |
| 01-02-023 | A*02:01:01 | X | B*15:01:01 | B*44:02:01 | C*03:03:01 | C*05:01:01 | DPA1*01:03:01 |
| D290_CMV | A*02:01:01 | A*68:02:01 | B*07:02:01 | B*44:02:01 | C*05:01:01 | C*07:02:01 | DPA1*01:03:01 |
| D400_CMV | A*02:01:01 | A*68:01:02 | B*39:01:01 | B*40:01:02 | C*03:19 | C*07:02:01 | DPA1*01:03:01 |
| D493_CMV | A*02:01:01 | A*33:03:01 | B*08:01:01 | B*39:10:01 | C*07:18 | C*12:03:01 | |
| D494_CMV | A*02:01:01 | A*23:01:01 | B*35:01:01 | B*44:02:01 | C*04:01:01 | C*05:01:01 | |
| non Covid_1 | A*02:02:01 | A*23:01:01 | B*07:02:01 | B*53:01:01 | C*04:01:01 | C*07:02:01 | DPA1*02:01:01 |
| non Covid_2 | A*24:02:01 | A*30:01:01 | B*13:02:01 | B*35:02:01 | C*04:01:01 | C*06:02:01 | DPA1*01:03:01 |
| non Covid_3 | A*01:01:01 | A*11:01:01 | B*14:02:01 | B*57:01:01 | C*06:02:01 | C*8:02:01 | DPA1*01:03:01 |
| non Covid_4 | A*01:01:01 | A*26:01:01 | B*08:01:01 | B*40:01:02 | C*03:04:01 | C*07:01:01 | DPA1*01:03:01 |

| Sample | DPA1 | DPB1 | | DQA1 | |
|---|---|---|---|---|---|
| cov-1 | X | DPB1*02:01:02 | DPB1*04:01:01 | DQA1*01:03:01 | DQA1*05:05:01 |
| 01-01-002 | X | DPB1*02:01:02 | DPB1*03:01:01 | DQA1*01:02:01 | DQA1*01:04:01 |
| 01-01-003 | X | DPB1*04:01:01 | DPB1*04:02:01 | DQA1*02:01 | DQA1*05:05:01 |
| 01-01-004 | X | DPB1*02:01:02 | DPB1*04:02:01 | DQA1*01:02:01 | DQA1*03:01:01 |
| 01-01-005 | X | DPB1*04:01:01 | DPB1*04:02:01 | DQA1*01:01:01 | DQA1*05:01:01 |
| 01-01-006 | X | DPB1*04:01:01 | DPB1*04:02:01 | DQA1*01:01:01 | DQA1*01:02:01 |
| 01-01-007 | DPA1*02:01:02 | DPB1*01:01:01 | DPB1*04:01:01 | DQA1*05:01:01 | X |
| 01-01-008 | DPA1*02:01:01 | DPB1*04:01:01 | DPB1*23:01:01 | DQA1*01:02:01 | X |
| 01-01-009 | ? | DPB1*04:01:01 | X | DQA1*01:05:01 | DQA1*02:01 |
| 01-01-010 | DPA1*02:01:01 | DPB1*04:01:01 | DPB1*104:01 | DQA1*01:01:02 | DQA1*01:02:01 |
| 01-01-011 | X | DPB*02:02 | DPB1*03:01:01 | DQA1*01:04:01 | DQA1*05:01:01 |
| 01-01-012 | X | DPB1*04:01:01 | X | DQA1*01:02:01 | DQA1*05:05:01 |
| 01-01-013 | DPA1*01:04 | DPB1*02:01:02 | DPB1*15:01:01 | DQA1*01:01:01 | DQA1*03:01:01 |
| 01-01-014 | X | DPB1*04:01:01 | X | DQA1*01:02:01 | DQA1*05:05:01 |
| 01-01-015 | X | DPB1*02:01:02 | DPB1*04:0101 | DQA1*01:02:01 | DQA1*05:05:01 |
| 01-01-016 | X | DPB1*03:01:01 | DPB1*04:01:01 | DQA1*02:01 | DQA1*05:05:01 |
| 01-02-001 | DPA1*03:01 | DPB1*01:01:01 | DPB1*105:01 | DQA1*01:01:01 | DQA1*05:01:01 |
| 01-02-002 | DPA1*02:01:01 | DPB1*13:01:01 | DPB1*23:01:01 | DQA1*01:02:01 | X |
| 01-02-003 | X | DPB1*04:01:01 | X | DQA1*01:01:02 | DQA1*03:01:01 |
| 01-02-004 | X | DPB1*02:01:02 | DPB1*16:01:01 | DQA1*01:02:01 | DQA1*02:01 |
| 01-02-005 | X | DPB1*04:01:01 | DPB1*04:02:01 | DQA1*03:03:01 | DQA1*05:05:01 |
| 01-02-006 | X | DPB1*04:01:01 | DPB1*04:02:01 | DQA1*01:01:01 | DQA1*01:02:01 |
| 01-02-007 | X | DPB1*01:01:01 | X | DQA1*01:02:01 | X |
| 01-02-008 | ? | DPB1*04:01:01 | DPB1*17:01 | DQA1*01:03:01 | DQA1*05:05:01 |
| 01-01-007 | DPA1*02:01:01 | DPB1*04:01:01 | DPB1*10:01:01 | DQA1*01:02:01 | DQA1*05:05:01 |
| 01-01-008 | X | DPB1*02:01:02 | DPB1*23:01:01 | DQA1*01:01:01 | DQA1*02:01 |
| 01-01-009 | X | DPB1*04:01:01 | X | DQA1*01:02:01 | DQA1*01:02:02 |
| 01-01-020 | X | DPB1*02:01:02 | DPB1*04:01:01 | DQA1*01:02:01 | DQA1*01:02:02 |
| 01-01-021 | DPA1*02:01:02 | DPB1*01:01:01 | DPB1*04:02:01 | DQA1*02:01 | DQA1*05:01:01 |
| 01-01-022 | X | DPB1*04:01:01 | DPB1*04:02:01 | DQA1*01:02:01 | DQA1*05:01:01 |
| 01-01-023 | X | DPB1*04:01:01 | X | DQA1*01:03:01 | DQA1*03:01:01 |
| 01-01-024 | X | DPB1*04:01:01 | X | DQA1*02:01 | DQA1*05:05:01 |
| 01-01-025 | X | DPB1*04:01:01 | X | DQA1*01:02:01 | DQA1*04:01:01 |
| 01-01-026 | X | DPB1*04:01:01 | DPB1*04:02:01 | DQA1*01:01:01 | X |
| 01-01-027 | X | DPB1*04:01:01 | DPB1*04:02:01 | DQA1*01:01:01 | DQA1*04:01:01 |
| 01-01-028 | X | DPB1*04:01:01 | DPB1*06:01 | DQA1*01:02:01 | DQA1*02:01 |
| 01-01-029 | X | DPB1*02:01:02 | DPB1*04:01:01 | DQA1*01:01:02 | DQA1*02:01 |
| 01-01-030 | DPA1*02:01:02 | DPB1*01:01:01 | DPB1*04:01:01 | DQA1*01:02:01 | DQA1*05:01:01 |
| 01-01-031 | X | DPB1*03:01:01 | DPB1*04:01:01 | DQA1*02:01 | DQA1*04:01:01 |
| 01-01-032 | DPA1*02:01:01 | DPB1*04:01:01 | DPB1*17:01 | DQA1*01:02:01 | DQA1*05:05:01 |
| 01-01-033 | DPA1*02:02:02 | DPB1*04:01:01 | DPB1*11:01:01 | DQA1*02:01 | X |
| 01-01-034 | X | DPB1*04:01:01 | X | DQA1*01:02:01 | DQA1*02:01 |
| 01-01-035 | DPA1*02:01:01 | DPB1*06:01 | DPB1*17:01 | DQA1*02:01 | DQA1*05:05:01 |
| 01-01-036 | DPA1*01:04 | DPB1*04:01:01 | DPB1*15:01:01 | DQA1*01:03:01 | DQA1*05:05:01 |
| 01-01-037 | DPA1*02:01:01 | DPB1*02:01:02 | DPB1*17:01 | DQA1*01:02:01 | DQA1*02:01 |
| 01-01-038 | X | DPB1*02:01:02 | DPB1*04:02:01 | DQA1*03:03:01 | DQA1*05:05:01 |
| 01-01-039 | X | DPB1*04:01:01 | DPB1*04:02:01 | DQA1*01:01:01 | DQA1*05:05:01 |
| 01-02-009 | | DPB1*02:01:02 | DPB1*04:01:01 | DQA1*01:03:01 | DQA1*02:01 |
| 01-02-010 | DPA1*02:02:02 | DPB1*01:01:01 | X | DQA1*01:02:01 | DQA1*04:01:02 |
| 01-02-011 | | DPB1*01:01:01 | DPB1*85:01 | DQA1*01:03:01 | DQA1*02:01 |
| 01-02-012 | X | DPB1*03:01:01 | DPB1*04:01:01 | DQA1*01:01:01 | DQA1*04:01:01 |
| 01-02-013 | DPA1*02:01:01 | DPB1*04:01:01 | DPB1*11:01:01 | DQA1*01:01:02 | DQA1*02:01 |
| 01-02-014 | X | DPB1*17:01 | DPB1*131:01 | DQA1*01:02:01 | DQA1*05:01:01 |
| 01-02-015 | X | DPB1*04:02:01 | X | DQA1*03:01:01 | DQA1*04:01:01 |
| 01-02-016 | DPA1*03:01 | DPB1*11:01:01 | DPB1*105:01 | DQA1*01:05:01 | DQA1*02:01 |
| 01-02-017 | X | DPB1*02:01:02 | DPB1*06:01 | DQA1*01:02:02 | DQA1*03:01:01 |
| 01-02-018 | DPA1*03:01 | DPB1*01:01:01 | DPB1*105:01 | DQA1*01:02:01 | DQA1*01:05:01 |
| 01-02-019 | X | DPB1*02:01:02 | DPB1*04:01:01 | DQA1*02:01 | X |
| 01-02-020 | DPA1*02:01:08 | DPB1*01:01:01 | DPB1*03:01:01 | DQA1*04:01:01 | DQA1*05:05:01 |
| 01-02-021 | X | DPB1*04:01:01 | DPB1*04:02:01 | DQA1*02:01 | DQA1*03:01:01 |
| 01-02-022 | X | DPB1*03:01:01 | DPB1*06:01 | DQA1*01:02:01 | DQA1*03:01:01 |
| 01-02-023 | X | DPB1*04:01:01 | X | DQA1*03:01:01 | DQA1*03:02 |
| D290_CMV | DPA1*02:01:01 | DPB1*04:01:01 | DPB1*30:01 | DQA1*01:02:01 | DQA1*03:01:01 |
| D400_CMV | DPA1*02:01:02 | DPB1*01:01:01 | DPB1*04:01:01 | DQA1*03:01:01 | DQA1*04:01:01 |
| D493_CMV | | DPB1*18:01 | DPB1*85:01 | DQA1*01:02:01 | X |
| D494_CMV | | DPB1*04:01:01 | DPB1*85:01 | DQA1*03:03:01 | DQA1*05:05:01 |
| non Covid_1 | X | DPB1*17:01 | DPB1*131:01 | DQA1*01:05:01 | DQA1*03:03:01 |
| non Covid_2 | X | DPB1*04:01:01 | DPB1*04:02:01 | DQA1*02:01 | X |
| non Covid_3 | DPA1*02:01:01 | DPB1*03:01:01 | DPB1*05:01:01 | DQA1*01:02:01 | DQA1*05:01:01 |
| non Covid_4 | DPA1*02:01:01 | DPB1*04:01:01 | DPB1*10:01:01 | DQA1*04:01:01 | X |

| Sample | DRB1 | | DRB | |
|---|---|---|---|---|
| cov-1 | DRB1*11:04:01 | DRB1*13:01:01 | DRB3*01:01:02 | DRB3*02:02:01 |
| 01-01-002 | DRB1*13:02:01 | DRB1*14:54:01 | DRB3*02:02:01 | DRB3*03:01:01 |
| 01-01-003 | DRB1*11:01:01 | DRB1*07:01:01 | DRB3*02:02:01 | DRB4*01:03:01 |
| 01-01-004 | DRB1*15:03:01 | DRB1*04:07:01 | DRB4*01:03:01 | DRB5*01:01:01 |
| 01-01-005 | DRB1*01:01:01 | DRB1*03:01:01 | DRB3*01:01:02 | X |
| 01-01-006 | DRB1*01:01:01 | DRB1*15:01:01 | DRB5*01:01:01 | X |
| 01-01-007 | DRB1*03:01:01 | X | DRB3*01:01:02 | X |
| 01-01-008 | DRB1*15:01:01 | X | DRB5*01:01:01 | X |
| 01-01-009 | DRB1*10:01:01 | DRB1*07:01:01 | DRB4*01:03:01 | X |
| 01-01-010 | DRB1*01:02:01 | DRB1*15:01:01 | DRB5*01:01:01 | X |
| 01-01-011 | DRB1*03:01:01 | DRB1*14:54:01 | DRB3*02:02:01 | X |
| 01-01-012 | DRB1*11:01:01 | DRB1*13:02:01 | DRB3*02:02:01 | DRB3*03:01:01 |
| 01-01-013 | DRB1*01:01:01 | DRB1*04:04:01 | DRB4*01:03:01 | X |
| 01-01-014 | DRB1*15:01:01 | DRB1*13:03:01 | DRB3*01:01:02 | DRB5*01:01:01 |
| 01-01-015 | DRB1*15:01:01 | DRB1*11:01:01 | DRB3*02:02:01 | DRB5*01:01:01 |
| 01-01-016 | DRB1*11:04:01 | DRB1*07:01:01 | DRB3*02:02:01 | DRB4*01:03:01 |
| 01-02-001 | DRB1*01:01:01 | DRB1*08:04:01 | | |
| 01-02-002 | DRB1*15:01:01 | | DRB5*01:01:01 | |
| 01-02-003 | DRB1*01:02:01 | DRB1*04:02:01 | DRB4*01:03:01 | X |
| 01-02-004 | DRB1*15:01:01 | DRB1*07:01:01 | DRB4*01:01:01 | DRB5*01:01:01 |
| 01-02-005 | DRB1*13:03:01 | DRB1*04:01:01 | DRB3*01:01:02 | DRB4*01:03:01 |
| 01-02-006 | DRB1*01:01:01 | DRB1*15:01:01 | DRB5*01:01:01 | X |
| 01-02-007 | DRB1*15:02:01 | X | DRB5*01:01:01 | X |
| 01-02-008 | DRB1*15:02:01 | DRB1*12:01:01 | DRB3*02:02:01 | DRB5*01:02 |
| 01-01-007 | DRB1*11:04:01 | DRB1*13:02:01 | DRB3*02:02:01 | DRB3*03:01:01 |
| 01-01-008 | DRB1*01:03 | DRB1*07:01:01 | DRB4*01:03:01 | X |
| 01-01-009 | DRB1*15:01:01 | DRB1*16:01:01 | DRB5*01:01:01 | DRB5*02:02 |
| 01-01-020 | DRB1*15:01:01 | DRB1*16:01:01 | DRB5*01:01:01 | DRB5*02:02 |
| 01-01-021 | DRB1*03:01:01 | DRB1*07:01:01 | DRB3*01:01:02 | DRB4*01:03:01 |
| 01-01-022 | DRB1*15:01:01 | DRB1*03:01:01 | DRB3*02:02:01 | DRB5*01:01:01 |
| 01-01-023 | DRB1*13:01:01 | DRB1*04:01:01 | DRB3*02:02:01 | DRB4*01:03:01 |
| 01-01-024 | DRB1*12:01:01 | DRB1*07:01:01 | DRB3*02:02:01 | DRB4*01:01:01 |
| 01-01-025 | DRB1*15:01:01 | DRB1*08:01:01 | | DRB5*01:01:01 |
| 01-01-026 | DRB1*01:01:01 | X | | |
| 01-01-027 | DRB1*01:01:01 | DRB1*08:01:01 | DRB3*01:15 | X |
| 01-01-028 | DRB1*13:02:01 | DRB1*07:01:01 | DRB3*03:01:01 | DRB4*01:03:01 |
| 01-01-029 | DRB1*01:02:01 | DRB1*07:01:01 | DRB4*01:03:01 | X |
| 01-01-030 | DRB1*15:01:01 | DRB1*03:01:01 | DRB3*01:01:02 | DRB5*01:01:01 |
| 01-01-031 | DRB1*08:01:01 | DRB1*07:01:01 | | DRB4*01:03:01 |
| 01-01-032 | DRB1*15:01:01 | DRB1*13:03:01 | DRB3*01:01:02 | DRB5*01:01:01 |
| 01-01-033 | DRB1*07:01:01 | X | DRB4*01:01:01 | X |
| 01-01-034 | DRB1*13:02:01 | DRB1*07:01:01 | DRB3*03:01:01 | DRB4*01:01:01 |
| 01-01-035 | DRB1*11:04:01 | DRB1*07:01:01 | DRB3*02:02:01 | DRB4*01:03:01 |
| 01-01-036 | DRB1*15:02:01 | DRB1*11:01:01 | DRB3*02:02:01 | DRB5*01:02 |
| 01-01-037 | DRB1*15:01:01 | DRB1*07:01:01 | DRB4*01:03:01 | DRB5*01:01:01 |
| 01-01-038 | DRB1*11:04:01 | DRB1*04:05:01 | DRB3*02:02:01 | DRB4*01:03:01 |
| 01-01-039 | DRB1*01:01:01 | DRB1*13:05:01 | DRB3*02:02:01 | X |
| 01-02-009 | DRB1*15:01:01 | DRB1*07:01:01 | DRB4*01:03:01 | DRB5*01:01:01 |
| 01-02-010 | DRB1*08:04:01 | DRB1*13:02:01 | DRB3*03:01:01 | X |
| 01-02-011 | DRB1*13:01:01 | DRB1*07:01:01 | DRB3*01:01:02 | DRB4*01:01:01 |
| 01-02-012 | DRB1*01:03 | DRB1*08:01:01 | | |
| 01-02-013 | DRB1*01:02:01 | DRB1*07:01:01 | DRB4*01:01:01 | X |
| 01-02-014 | DRB1*03:01:01 | DRB1*13:02:01 | DRB3*02:02:01 | DRB3*03:01:01 |
| 01-02-015 | DRB1*08:02:01 | DRB1*04:04:01 | | DRB4*01:03:01 |
| 01-02-016 | DRB1*10:01:01 | DRB1*07:01:01 | DRB4*01:03:01 | x |
| 01-02-017 | DRB1*16:01:01 | DRB1*04:04:01 | DRB4*01:03:01 | DRB5*02:02 |
| 01-02-018 | DRB1*15:03:01 | DRB1*12:01:01 | DRB3*02:02:01 | DRB5*01:01:01 |
| 01-02-019 | DRB1*07:01:01 | X | DRB4*01:01:01 | DRB4*01:03:01 |
| 01-02-020 | DRB1*03:02:01 | DRB1*11:01:01 | DRB3*01:01:02 | DRB3*02:02:01 |
| 01-02-021 | DRB1*04:01:01 | DRB1*07:01:01 | DRB4*01:03:01 | DRB4*01:03:01 |
| 01-02-022 | DRB1*13:02:01 | DRB1*04:01:01 | DRB3*03:01:01 | DRB4*01:03:01 |
| 01-02-023 | DRB1*04:01:01 | DRB1*09:01:02 | DRB4*01:03:01 | DRB4*01:03:02 |
| D290_CMV | DRB1*15:03:01 | DRB1*04:01:01 | DRB4*01:03:01 | DRB5*01:01:01 |
| D400_CMV | DRB1*08:01:01 | DRB1*04:03:01 | DRB4*01:03:01 | X |
| D493_CMV | DRB1*15:03:01 | DRB1*13:02:01 | DRB3*03:01:01 | DRB5*01:01:01 |
| D494_CMV | DRB1*08:04:01 | DRB1*04:01:01 | DRB4*01:03:01 | X |
| non Covid_1 | DRB1*10:01:01 | DRB1*09:01:02 | | |
| non Covid_2 | DRB1*07:01:01 | X | DRB4*01:03:01 | DRB4*01:03:01 |
| non Covid_3 | DRB1*03:01:01 | DRB1*13:02:01 | DRB3*01:01:02 | DRB3*03:01:01 |
| non Covid_4 | DRB1*08:01:01 | X | DRB3*01:01:03 | X |

[0351] This approach leveraged an antigen discovery platform coupled with a newly designed comprehensive SARS-CoV-2 library to identify T cell targets directly from patient memory T cells in an unbiased way. T cell targets were profiled in a cohort of patients who successfully cleared their SARS-CoV-2 infection.

[0352] First, sample COVID functional epitope targets were identified from patients. For example, sample screen data in FIG. 1 illustrate the identification of common shared epitopes and epitopes that are unique to individual patients. Targets FTYASALWEI and KLWAQCVQL were identified in both patients. Targets YLQPRTFLL and YLFDESGEFKL were identified in patient 01-01-001 only. This figure also demonstrates the robustness of the epitope discovery approach. Identified epitopes are present in multiple distinct protein fragment tiles that serve as independent reagents. In most cases, all or nearly all of these tiles score in the screen, thereby confirming the proper mapping of the T cell response and helping to quantify its strength.

[0353] It was also found that identified T cell epitopes are shared across multiple patients. For example, KLWAQCVQL was identified in 7 out of 9 HLA-A*02:01 patients (FIG. 2A). KTFPPTEPKK was identified in all five patients with HLA-A*03:01 allele (FIG. 2B). FIGS. 2A and 2B show that the identified HLA allele-restricted T cell epitope targets are shared across multiple patients. Similarly, FIG. 1A through FIG. 1F provide a summary of T cell epitopes shared across multiple patients.

[0354] Multiple peptides that elicit COVID-specific T-cell response across patients were identified (FIG. 3 and Table 4). For example, Table 4 lists T cell epitopes identified in SARS-CoV-2 patients. Each row represents a single epitope, grouped based on HLA-A02, HLA-A03, HLA-A01, HLA-A11, HLA-A24, or HLA-B307 presentation, and indicates inter alia the epitope sequence, the open reading frame (ORE) from which it was derived, and the number of screened patients recognizing that epitope. The columns on the right (F-L) indicate the patients who had reactivity to each identified epitope.

TABLE 4

| | | | | | | | | # of | |
|---|---|---|---|---|---|---|---|---|---|
| | | | | | | | | patients | # of |
| | | Derived | | | | | | enriching | patients |
| | | from | | | | | | epitope | enriching |
| | Epitope | SARS- | A01- | A01- | A0101_ | A0101_ | A0101_ | >1.5 | epitope >5 |
| HLA | (N- to C- | CoV-2 | 01-01- | 01-02- | 01-01- | 01-01- | 01-01- | (moderate | (high |
| Allele | terminus) | Protein | 030 | 019 | 003 | 007 | 009 | stringency) | stringency) |
| A01 | VPTDNYITTY | ORF1ab | 16.49 | 7.92 | 9.22 | 0.59 | 2.96 | 4 | 3 |
| A01 | FTSDYYQLYS | ORF3a | 4.61 | 56.34 | 7.96 | 1.76 | 14.15 | 5 | 3 |
| A01 | CTDDNALAY | ORF1ab | 6.71 | 4.08 | 4.00 | 1.55 | 3.23 | 5 | 1 |
| A01 | SSPDDQIGYY | N | 1.21 | 1.98 | 2.32 | 2.46 | 8.83 | 4 | 1 |
| A01 | HTTDPSFLGRY | ORF1ab | 11.99 | 26.22 | 6.70 | 4.48 | 8.93 | 5 | 4 |
| A01 | TACTDDNALAYY | ORF1ab | 6.71 | 4.08 | 4.00 | 1.55 | 3.23 | 5 | 1 |
| A01 | TDDNALAY | ORF1ab | 6.79 | 4.35 | 4.10 | 1.85 | 3.29 | 5 | 1 |
| A01 | GTDLEGNFY | ORF1ab | 4.35 | 0.48 | 4.69 | 0.46 | 1.00 | 2 | 0 |
| A01 | PTDNYITTY | ORF1ab | 16.56 | 7.81 | 9.23 | 0.59 | 2.99 | 4 | 3 |
| A01 | TCDGTTFTY | ORF1ab | 7.01 | 1.78 | 7.34 | 0.72 | 1.02 | 3 | 2 |
| A01 | SMDNSPNLA | ORF1ab | 3.53 | 1.28 | 4.05 | 0.58 | 0.93 | 2 | 0 |
| A01 | YHTTDPSFLGRY | ORF1ab | 11.99 | 26.22 | 6.70 | 4.48 | 8.93 | 5 | 4 |
| A01 | LTTAAKLMVVIPD | ORF1ab | 4.65 | 1.20 | 4.46 | 0.72 | 0.92 | 2 | 0 |
| | Y | | | | | | | | |
| A01 | VDTDFVNEFY | ORF1ab | 4.88 | 0.96 | 4.05 | 0.74 | 1.58 | 3 | 0 |
| A01 | ACTDDNALAYY | ORF1ab | 6.71 | 4.08 | 4.00 | 1.55 | 3.23 | 5 | 1 |
| A01 | FTSDYYQLY | ORF3a | 4.61 | 56.34 | 7.96 | 1.76 | 14.15 | 5 | 3 |
| A01 | YFTSDYYQLY | ORF3a | 4.61 | 56.34 | 7.96 | 1.76 | 14.15 | 5 | 3 |
| A01 | DTDFVNEFY | ORF1ab | 4.88 | 0.96 | 4.05 | 0.74 | 1.58 | 3 | 0 |
| A01 | SSDNIALLV | M | 2.34 | 11.25 | 0.99 | 1.63 | 2.11 | 4 | 1 |
| A01 | CTDDNALAYY | ORF1ab | 6.71 | 4.08 | 4.00 | 1.55 | 3.23 | 5 | 1 |
| A01 | TTDPSFLGRY | ORF1ab | 11.99 | 26.22 | 6.70 | 4.48 | 8.93 | 5 | 4 |
| A01 | LSPRWYFYY | N | 0.92 | 1.00 | 2.56 | 3.43 | 5.36 | 3 | 1 |
| A01 | YYHTTDPSFLGRY | ORF1ab | 11.99 | 26.22 | 6.70 | 4.48 | 8.93 | 5 | 4 |
| A01 | EYYHTTDPSFLGRY | ORF1ab | 11.99 | 26.22 | 6.70 | 4.48 | 8.93 | 5 | 4 |
| A01 | TSDYYQLY | ORF3a | 4.61 | 56.34 | 7.96 | 1.76 | 14.15 | 5 | 3 |
| A01 | ACTDDNALAY | ORF1ab | 6.71 | 4.08 | 4.00 | 1.55 | 3.23 | 5 | 1 |
| A01 | VATSRTLSYY | M | 0.95 | 14.59 | 0.92 | 1.02 | 2.14 | 2 | 1 |
| A01 | ATSRTLSYY | M | 0.95 | 14.59 | 0.92 | 1.02 | 2.14 | 2 | 1 |
| A01 | NTCDGTTFTY | ORF1ab | 7.09 | 1.49 | 7.26 | 0.62 | 1.00 | 2 | 2 |

| | | | | | | | | | | | | | # of | |
|---|---|---|---|---|---|---|---|---|---|---|---|---|---|---|
| | | | | | | | | | | | | | patients | # of |
| | | Derived | | | | | | | | | | | enriching | patients |
| | | from | | | | | | | | | | | epitope | enriching |
| | Epitope | SARS- | A02_ | A02_ | A02_ | A02_ | A02_ | A02_ | A02_ | A02_ | A02_ | A02_ | >1.5 | epitope >5 |
| HLA | (N- to C- | CoV-2 | 01-01- | 01-01- | 01-02- | 01-01- | 01-02- | 01-02- | 01-01- | 01-02- | 01-01- | 01-01- | (moderate | (high |
| Alele | terminus) | Protein | 001 | 004 | 006 | 007 | 005 | 008 | 008 | 011 | 016 | 020 | stringency) | stringency) |
| A02 | ALWEIQQ | ORF1ab | 13.21 | 5.50 | 1.02 | 0.39 | 1.44 | 13.10 | 0.93 | 0.35 | 0.57 | 0.50 | 3 | 3 |
| | VV | | | | | | | | | | | | | |
| A02 | YLQPRTFL | S | 23.55 | 1.75 | 3.59 | 0.49 | 8.44 | 10.73 | 1.35 | 1.08 | 0.51 | 1.71 | 6 | 3 |
| | LK | | | | | | | | | | | | | |
| A02 | SALWEIQQ | ORF1ab | 13.21 | 5.50 | 1.02 | 0.39 | 1.44 | 13.10 | 0.93 | 0.35 | 0.57 | 0.50 | 3 | 3 |
| | VV | | | | | | | | | | | | | |
| A02 | ATYYLFDE | ORF1ab | 5.05 | 0.92 | 1.54 | 0.37 | 0.64 | 2.18 | 0.83 | 0.31 | 0.42 | 0.59 | 3 | 1 |
| | SGEFKL | | | | | | | | | | | | | |

| | | | | | | | | | | | | | | |
|---|---|---|---|---|---|---|---|---|---|---|---|---|---|---|
| A02 | PLLYDAN | ORF3a | 2.65 | 0.54 | 2.92 | 0.57 | 3.70 | 8.29 | 0.81 | 0.28 | 2.33 | 0.43 | 5 | 1 |
| | YFL | | | | | | | | | | | | | |
| A02 | LLYDANY | ORF3a | 2.65 | 0.54 | 2.92 | 0.57 | 3.70 | 8.29 | 0.81 | 0.28 | 2.33 | 0.43 | 5 | 1 |
| | FL | | | | | | | | | | | | | |
| A02 | RLANECA | ORF1ab | 0.46 | 0.58 | 1.37 | 0.49 | 3.04 | 1.03 | 0.52 | 0.34 | 0.37 | 0.40 | 1 | 0 |
| | QV | | | | | | | | | | | | | |
| A02 | QLSSYSLF | ORF1ab | 0.49 | 0.38 | 1.48 | 0.42 | 4.98 | 2.74 | 0.60 | 0.91 | 0.27 | 0.58 | 2 | 0 |
| | DM | | | | | | | | | | | | | |
| A02 | YLFDESGE | ORF1ab | 4.75 | 0.87 | 1.45 | 0.36 | 0.60 | 2.06 | 0.78 | 0.29 | 0.40 | 0.56 | 2 | 0 |
| | FKL | | | | | | | | | | | | | |
| A02 | FLIVAAIVF | ORF7a | 3.69 | 0.57 | 0.32 | 1.07 | 0.29 | 0.22 | 0.75 | 0.10 | 0.76 | 0.16 | 1 | 0 |
| | I | | | | | | | | | | | | | |
| A02 | YANSVFNI | ORF1ab | 0.52 | 0.53 | 1.25 | 0.54 | 1.66 | 0.65 | 0.56 | 0.41 | 0.36 | 0.42 | 1 | 0 |
| A02 | FLCWHTN | ORF3a | 1.81 | 0.58 | 2.67 | 0.70 | 4.93 | 6.82 | 1.06 | 0.23 | 1.50 | 0.32 | 5 | 1 |
| | CYDYCI | | | | | | | | | | | | | |
| A02 | SMWALIIS | ORF1ab | 0.53 | 0.59 | 1.58 | 0.34 | 0.86 | 3.23 | 0.72 | 0.30 | 0.34 | 0.64 | 2 | 0 |
| | V | | | | | | | | | | | | | |
| A02 | LLLDRLNQ | N | 1.76 | 1.08 | 1.46 | 1.03 | 3.89 | 1.42 | 1.15 | 0.98 | 0.74 | 1.13 | 2 | 0 |
| | L | | | | | | | | | | | | | |
| A02 | FAFACPDG | ORF7a | 2.45 | 0.66 | 0.78 | 0.63 | 0.40 | 0.28 | 0.91 | 0.24 | 0.72 | 0.55 | 1 | 0 |
| | V | | | | | | | | | | | | | |
| A02 | YRLANEC | ORF1ab | 0.44 | 0.57 | 1.36 | 0.46 | 2.97 | 0.96 | 0.51 | 0.33 | 0.38 | 0.37 | 1 | 0 |
| | AQV | | | | | | | | | | | | | |
| A02 | GYLQPRTF | S | 23.55 | 1.75 | 3.59 | 0.49 | 8.44 | 10.73 | 1.35 | 1.08 | 0.51 | 1.71 | 6 | 3 |
| | LL | | | | | | | | | | | | | |
| A02 | YLQPRTFL | S | 23.55 | 1.75 | 3.59 | 0.49 | 8.44 | 10.73 | 1.35 | 1.08 | 0.51 | 1.71 | 6 | 3 |
| | L | | | | | | | | | | | | | |
| A02 | KLWAQCV | ORF1ab | 6.72 | 19.01 | 2.16 | 0.45 | 3.68 | 12.99 | 1.98 | 0.54 | 3.73 | 0.69 | 7 | 3 |
| | QL | | | | | | | | | | | | | |
| A02 | ALWEIQQ | ORF1ab | 12.46 | 5.46 | 1.01 | 0.40 | 1.31 | 12.29 | 0.96 | 0.35 | 0.54 | 0.58 | 3 | 3 |
| | V | | | | | | | | | | | | | |
| A02 | ALDQAISM | ORF1ab | 0.49 | 0.53 | 1.34 | 0.36 | 0.88 | 2.60 | 0.73 | 0.18 | 0.37 | 0.59 | 1 | 0 |
| | WA | | | | | | | | | | | | | |
| A02 | SLFDMSKF | ORF1ab | 0.52 | 0.34 | 1.73 | 0.38 | 5.53 | 2.95 | 0.54 | 0.91 | 0.26 | 0.47 | 3 | 1 |
| | PL | | | | | | | | | | | | | |
| A02 | LLAKDTTE | ORF1ab | 6.46 | 17.45 | 2.01 | 0.43 | 3.40 | 11.98 | 1.98 | 0.48 | 3.78 | 0.70 | 7 | 3 |
| | A | | | | | | | | | | | | | |
| A02 | MDLFMRIF | ORF1ab | 0.16 | 0.10 | 0.26 | 0.10 | 0.10 | 0.10 | 2.03 | 0.50 | 0.10 | 0.10 | 1 | 0 |
| | TI | | | | | | | | | | | | | |
| A02 | KILGLPTQ | ORF1ab | 0.58 | 0.77 | 0.88 | 0.57 | 0.53 | 0.54 | 0.96 | 0.25 | 0.45 | 0.65 | 0 | 0 |
| | TV | | | | | | | | | | | | | |
| A02 | SLQTYVTQ | S | 0.74 | 1.09 | 1.38 | 0.64 | 0.83 | 1.99 | 1.18 | 0.59 | 0.41 | 0.68 | 1 | 0 |
| | QL | | | | | | | | | | | | | |
| A02 | ALSKGVHF | ORF3a | 0.36 | 0.86 | 2.42 | 0.20 | 2.48 | 0.40 | 0.29 | 0.28 | 0.41 | 0.20 | 2 | 0 |
| | V | | | | | | | | | | | | | |
| A02 | VMCGGSL | ORF1ab | 0.39 | 0.49 | 1.35 | 0.42 | 2.38 | 0.76 | 0.46 | 0.34 | 0.36 | 0.39 | 1 | 0 |
| | YV | | | | | | | | | | | | | |
| A02 | TYASALW | ORF1ab | 13.87 | 5.94 | 1.05 | 0.42 | 1.60 | 14.65 | 0.98 | 0.37 | 0.64 | 0.56 | 4 | 3 |
| | EIQQVV | | | | | | | | | | | | | |
| A02 | LLYDANY | ORF3a | 2.65 | 0.54 | 2.92 | 0.57 | 3.70 | 8.29 | 0.81 | 0.28 | 2.33 | 0.43 | 5 | 1 |
| | FLC | | | | | | | | | | | | | |
| A02 | FDMSKFPL | ORF1ab | 0.43 | 0.33 | 1.71 | 0.30 | 4.60 | 2.16 | 0.52 | 0.66 | 0.23 | 0.39 | 3 | 0 |
| | KL | | | | | | | | | | | | | |
| A02 | TYYLFDES | ORF1ab | 5.05 | 0.92 | 1.54 | 0.37 | 0.64 | 2.18 | 0.83 | 0.31 | 0.42 | 0.59 | 3 | 1 |
| | GEFKL | | | | | | | | | | | | | |
| A02 | YSLFDMSK | ORF1ab | 0.49 | 0.36 | 1.82 | 0.40 | 5.92 | 3.09 | 0.57 | 0.97 | 0.28 | 0.50 | 3 | 1 |
| | FPL | | | | | | | | | | | | | |
| A02 | YASALWEI | ORF1ab | 13.21 | 5.50 | 1.02 | 0.39 | 1.44 | 13.10 | 0.93 | 0.35 | 0.57 | 0.50 | 3 | 3 |
| | QQVV | | | | | | | | | | | | | |
| A02 | FLLKYNEN | S | 27.06 | 1.62 | 4.28 | 0.30 | 9.90 | 11.96 | 1.07 | 1.01 | 0.62 | 1.73 | 6 | 3 |
| | GTI | | | | | | | | | | | | | |
| A02 | FTYASAL | ORF1ab | 13.44 | 5.87 | 1.04 | 0.44 | 1.52 | 14.08 | 0.98 | 0.36 | 0.61 | 0.65 | 4 | 3 |
| | WEI | | | | | | | | | | | | | |
| A02 | YYLFDESG | ORF1ab | 5.05 | 0.92 | 1.54 | 0.37 | 0.64 | 2.18 | 0.83 | 0.31 | 0.42 | 0.59 | 3 | 1 |
| | EFKL | | | | | | | | | | | | | |
| A02 | RLWLCWK | ORF3a | 1.16 | 1.27 | 2.53 | 0.73 | 4.14 | 5.94 | 0.66 | 0.17 | 1.07 | 0.26 | 3 | 1 |
| | CRSKNPL | | | | | | | | | | | | | |

| | | | | | | | | # of | # of |
|---|---|---|---|---|---|---|---|---|---|
| | | | | | | | | patients | patients |
| | | Derived | | | | | | enriching | enriching |
| | | from | | | | | | epitope | epitope |
| | Epitope | SARS- | A03_ | A03_ | A03_ | A03_ | A03_ | >1.5 | >5 |
| HLA | (N- to C- | CoV-2 | 01-02- | 01-02- | 01-01- | 01-02- | 01-01- | (moderate | (high |
| Allele | terminus) | Protein | 002 | 004 | 006 | 010 | 008 | stringency) | stringency) |
| A03 | TVIEVQGYK | ORF1ab | 19.57 | 0.90 | 0.93 | 1.56 | 0.82 | 2 | 1 |
| A03 | QIAPGQTGK | S | 7.06 | 1.46 | 5.98 | 1.78 | 5.07 | 4 | 3 |
| A03 | MMVTNNTFTLK | ORF1ab | 28.12 | 1.09 | 1.20 | 1.96 | 0.72 | 2 | 1 |
| A03 | RLFRKSNLK | S | 0.57 | 0.32 | 0.94 | 0.40 | 0.69 | 0 | 0 |
| A03 | YNSASFSTFK | S | 9.14 | 1.91 | 9.50 | 2.44 | 6.77 | 5 | 3 |
| A03 | VTNNTFTLK | ORF1ab | 28.12 | 1.09 | 1.20 | 1.96 | 0.72 | 2 | 1 |
| A03 | RQIAPGQTGK | S | 7.22 | 1.40 | 6.04 | 1.88 | 5.36 | 4 | 3 |
| A03 | KLFDRYFKY | ORF1ab | 26.97 | 1.40 | 0.76 | 1.02 | 0.80 | 1 | 1 |
| A03 | KTIQPRVEK | ORF1ab | 5.83 | 0.51 | 0.69 | 0.77 | 0.62 | 1 | 1 |
| A03 | CVADYSVLY | S | 7.38 | 1.67 | 7.82 | 2.03 | 5.13 | 5 | 3 |
| A03 | RLKLFDRYFK | ORF1ab | 27.41 | 1.42 | 0.81 | 1.08 | 0.85 | 1 | 1 |
| A03 | KTFPPTEPK | N | 13.59 | 5.24 | 17.45 | 6.20 | 6.03 | 5 | 5 |
| A03 | STFKCYGVSPTK | S | 12.60 | 2.17 | 12.94 | 3.05 | 9.24 | 5 | 3 |
| A03 | KCYGVSPTK | S | 12.60 | 2.17 | 12.94 | 3.05 | 9.24 | 5 | 3 |
| A03 | VLYNSASFSTFK | S | 9.14 | 1.91 | 9.50 | 2.44 | 6.77 | 5 | 3 |
| A03 | MVTNNTFTLK | ORF1ab | 28.12 | 1.09 | 1.20 | 1.96 | 0.72 | 2 | 1 |
| A03 | KTFPPTEPKK | N | 13.59 | 5.24 | 17.45 | 6.20 | 6.03 | 5 | 5 |
| A03 | KLFDRYFK | ORF1ab | 26.97 | 1.40 | 0.76 | 1.02 | 0.80 | 1 | 1 |
| A03 | QLPQGTTLPK | N | 1.14 | 1.96 | 1.16 | 1.35 | 1.57 | 2 | 0 |
| | | | | | | | | # of | # of |
| | | | | | | | | patients | patients |
| | | Derived | | | | | | enriching | enriching |
| | | from | | | | | | epitope | epitope |
| | Epitope | SARS- | A1101_ | A1101_ | A1101_ | A11- | A11- | >1.5 | >5 |
| HLA | (N- to C- | CoV-2 | 01-01- | 01-02- | 01-02- | 01-01- | 01-02- | (moderate | (high |
| Allele | terminus) | Protein | 003 | 007 | 008 | 039 | 012 | stringency) | stringency) |
| A11 | VTDTPKGPK | ORF1ab | 4.86 | 0.88 | 18.80 | 0.89 | 0.27 | 2 | 1 |
| A11 | VTNNTFTLK | ORF1ab | 4.26 | 0.59 | 0.71 | 0.43 | 0.60 | 1 | 0 |
| A11 | TVATSRTLSYYK | M | 2.51 | 5.06 | 0.51 | 0.79 | 1.15 | 2 | 1 |
| A11 | ASAFFGMSR | N | 0.93 | 5.84 | 1.13 | 0.94 | 0.35 | 1 | 1 |
| A11 | LIRQGTDYK | N | 1.09 | 4.14 | 1.74 | 1.20 | 0.65 | 2 | 0 |
| A11 | LLNKHIDAYK | N | 5.27 | 3.94 | 2.86 | 0.77 | 14.96 | 4 | 2 |
| A11 | AVILRGHLR | M | 1.76 | 3.09 | 0.82 | 0.70 | 1.06 | 2 | 0 |
| A11 | QDLKWARFPK | ORF1ab | 1.80 | 1.10 | 9.03 | 0.94 | 0.33 | 2 | 1 |
| A11 | VTLACFVLAAVY | M | 0.76 | 4.27 | 0.67 | 0.73 | 2.53 | 2 | 0 |
| | R | | | | | | | | |
| A11 | KVKYLYFIK | ORF1ab | 4.74 | 0.95 | 17.30 | 0.78 | 0.28 | 2 | 1 |
| A11 | STMTNRQFHQKL | ORF1ab | 0.69 | 3.75 | 1.16 | 0.92 | 0.37 | 1 | 0 |
| | LK | | | | | | | | |
| A11 | KTFPPTEPK | N | 6.23 | 2.36 | 3.74 | 0.85 | 21.00 | 4 | 2 |
| A11 | QQQGQTVTK | N | 1.69 | 3.60 | 2.01 | 0.99 | 0.56 | 3 | 0 |
| A11 | ATSRTLSYYK | M | 2.51 | 5.06 | 0.51 | 0.79 | 1.15 | 2 | 1 |
| A11 | ATEGALNTPK | N | 5.24 | 1.91 | 6.08 | 0.76 | 0.30 | 3 | 2 |
| A11 | KSAAEASKK | N | 1.67 | 4.14 | 2.22 | 1.00 | 0.53 | 3 | 0 |
| A11 | KAYNVTQAFGR | N | 1.71 | 4.44 | 2.20 | 0.98 | 0.38 | 3 | 0 |
| | | | | | | | | # of | # of |
| | | | | | | | | patients | patients |
| | | Derived | | | | | | enriching | enriching |
| | | from | | | | | | epitope | epitope |
| | Epitope | SARS- | A24- | A24- | A2402_ | A2402_ | A2402_ | >1.5 | >5 |
| HLA | (N- to C- | CoV-2 | 01-01- | 01-01- | 01-01- | 01-01- | 01-01- | (moderate | (high |
| Allele | terminus) | Protein | 015 | 030 | 006 | 007 | 011 | stringency) | stringency) |
| A24 | QYIKWPWYI | S | 1.45 | 11.23 | 0.52 | 1.15 | 2.06 | 2 | 1 |
| A24 | VYIGDPAQL | ORF1ab | 0.19 | 3.06 | 0.92 | 0.57 | 1.42 | 1 | 0 |
| A24 | VYFLQSINF | ORF3a | 0.23 | 5.45 | 0.50 | 0.95 | 1.08 | 1 | 1 |
| A24 | YYRRATRRI | N | 0.47 | 0.73 | 6.30 | 3.54 | 3.49 | 3 | 1 |
| A24 | RWYFYYLGTG | N | 0.44 | 0.69 | 8.12 | 4.61 | 4.26 | 3 | 1 |
| A24 | QYIKWPWYIW | S | 1.45 | 11.23 | 0.52 | 1.15 | 2.06 | 2 | 1 |
| A24 | KYEQYIKWPW | S | 1.46 | 10.64 | 0.62 | 1.13 | 2.07 | 2 | 1 |
| A24 | KWPWYIWLGF | S | 1.45 | 11.23 | 0.52 | 1.15 | 2.06 | 2 | 1 |
| A24 | LYLYALVYF | ORF3a | 0.23 | 5.45 | 0.50 | 0.95 | 1.08 | 1 | 1 |
| A24 | LYALVYFLQSINF | ORF3a | 0.23 | 5.45 | 0.50 | 0.95 | 1.08 | 1 | 1 |
| | V | | | | | | | | |
| A24 | YLYALVYFLQSIN | ORF3a | 0.23 | 5.45 | 0.50 | 0.95 | 1.08 | 1 | 1 |
| | F | | | | | | | | |
| A24 | QYIKWPWYIWLG | S | 1.45 | 11.23 | 0.52 | 1.15 | 2.06 | 2 | 1 |
| | F | | | | | | | | |
| A24 | LYAL VYFLQSINF | ORF3a | 0.23 | 5.45 | 0.50 | 0.95 | 1.08 | 1 | 1 |
| | | | | | | | | # of | # of |
| | | | | | | | | patients | patients |
| | | Derived | | | | | | enriching | enriching |
| | | from | | | | | | epitope | epitope |
| | Epitope | SARS- | B0702_ | B0702_ | B0702_ | B0702_ | B07_ | >1.5 | >5 |
| HLA | (N- to C- | CoV-2 | 01-02- | 01-02- | 01-01- | 01-01- | 01-01- | (moderate | (high |
| Allele | terminus) | Protein | 002 | 004 | 021 | 030 | 022 | stringency) | stringency) |
| B07 | SPRWYFYYLG | N | 17.70 | 16.68 | 5.03 | 7.12 | 0.29 | 4 | 4 |
| B07 | IPRRNVATL | ORF1ab | 3.56 | 0.80 | 0.52 | 1.26 | 0.13 | 1 | 0 |
| B07 | RPDTRYVL | ORF1ab | 10.65 | 1.74 | 1.69 | 1.71 | 0.28 | 4 | 1 |
| B07 | SPRWYFYYL | N | 17.70 | 16.68 | 5.03 | 7.12 | 0.29 | 4 | 4 |
| B07 | RPDTRYVLM | ORF1ab | 10.65 | 1.74 | 1.69 | 1.71 | 0.28 | 4 | 1 |
| B07 | IPRRNVATLQ | ORF1ab | 3.83 | 0.86 | 0.56 | 1.30 | 0.13 | 1 | 0 |
| B07 | EIPRRNVATL | ORF1ab | 3.56 | 0.80 | 0.52 | 1.26 | 0.13 | 1 | 0 |
| B07 | PRWYFYYL | N | 16.86 | 14.58 | 5.74 | 7.41 | 0.33 | 4 | 4 |
| B07 | LSPRWYFYYL | N | 17.70 | 16.68 | 5.03 | 7.12 | 0.29 | 4 | 4 |
| B07 | RIRGGDGKM | N | 11.87 | 12.54 | 2.83 | 4.78 | 0.34 | 4 | 2 |
| B07 | SLEIPRRNVATLQ | ORF1ab | 4.07 | 0.92 | 0.58 | 1.13 | 0.13 | 1 | 0 |
| | A | | | | | | | | |

[0355] Such peptides can: (1) serve as the basis for vaccine strategies that elicit protective T cell response; (2) be utilized to identify COVID-reactive T cell receptors for therapeutic applications; (3) be utilized for measuring COVID-specific T cell response as a diagnostic tool.

### Example 3: Analysis of Highly Immunodominant Peptides for SARS-CoV-2

[0356] Analyses were performed to further confirm the results presented in Example 1.

[0357] As described above, a recently-developed high-throughput screening technology, termed T-Scan (Kula et al. (2019) Cell 178:1016-1028), was used to simultaneously screen all the memory CD8+ T cells of 25 convalescent patients against every possible MHC class I epitope in SARS-CoV-2, as well as SARS-CoV and the four coronaviruses that cause the common cold (HKU1, OC43, 229E, and NL63). Because T cells recognize viral peptide targets in the context of MHC proteins, which are defined by an individual's HLA type, patients were selected who were positive for each of the six most prevalent HLA types (A*02:01, A*01:01, A*03:01, A*11:01, A*24:02, and B*07:02). Collectively, ˜90% of the U.S. population and ˜85% of the world population are positive for at least one of these six alleles (Maiers et al. (2007) Hum. Immunol. 68:779-788; Gonzalez-Galarza (2020) Nucl. Acids Res. 48:D783-D788). Efforts were focused on patients with relatively mild, disease (primarily non-hospitalized patients) in order to discover the most protective epitopes, but also included patients with moderate to severe disease to determine if T cell responses correlate with disease severity.

[0358] This strategy allowed for the determination of the precise epitopes in SARS-CoV-2 that are recognized by the memory CD8+ T cells of patients who have recovered from COVID-19. To do this, high-throughput cell-based screening technology (T-Scan) described above that enables simultaneous identification of the natural targets of CD8+ T cells in an unbiased, genome-wide fashion (FIG. 4A). Briefly, CD8+ T cells were co-cultured with a genome-wide library of target cells (HEK 293 cells). Each target cell in the library expresses a different 61-amino acid (61-aa) protein fragment. These fragments are processed naturally by the target cells and the appropriate peptide epitopes are displayed on class I MHCs on the cell surface. If a CD8+ T cell encounters its target in the co-culture, it secretes cytotoxic granules into the target cell, inducing apoptosis. Early apoptotic cells are then isolated from the co-culture and the expression cassettes are sequenced, thereby revealing the identity of the protein fragment. Because the assay is non-competitive, hundreds to thousands of T cells can be screened against tens of thousands of targets simultaneously.

[0359] To address the bottleneck of extensive sorting needed to isolate rare recognized target cells in high complexity libraries (Kula et al. (2019) Cell 178:1016-1028), target cells were engineered to express a granzyme B (GzB)-activated version of the scramblase enzyme, XKR8, which drives the rapid and efficient transfer of phosphatidylserine to the outer membrane of early apoptotic cells. Early apoptotic cells were then enriched by magnetic-activated cell sorting with Annexin V (see the methods and FIG. 1A). This modification increased throughput of the T-Scan assay 20-fold, enabling the rapid processing of a large number of patient samples.

[0360] To comprehensively map responses to SARS-CoV-2, a library of 61-aa protein fragments that tiled across all 11 open reading frames (ORFs) of SARS-CoV-2 in 20-aa steps, as described above (FIG. 4B). To capture the known genetic diversity of SARS-CoV-2, all protein-coding variants from the 104 isolates that had been reported as of Mar. 15, 2020 were included. In addition, the complete set of ORFs (ORFeome) of SARS-CoV and the four endemic coronaviruses that cause the common cold (betacoronaviruses HKU1 and OC43, and alphacoronaviruses NL63 and 229E) were included. As positive controls, known immunodominant antigens from cytomegalovirus, Epstein-Barr virus, and influenza virus were included. Finally, each protein fragment was represented ten times, each encoded with a unique nucleotide barcode to provide internal replicates in our screens, for a final library size of 43,420 clones.

[0361] To understand the scope and nature of acquired immunity, the focus was placed on the memory CD8⁺ T cells of convalescent COVID-19 patients, as described above. In total, peripheral blood mononuclear cells (PBMCs) were collected from 78 adult patients who had tested positive by viral PCR (swab test), had recovered from their disease, and had been out of quarantine according to Centers for Disease Control and Prevention (CDC) guidelines by at least two weeks. Patients were recruited at either of two centers: Atlantic Heath System in Morristown, NJ and Ochsner Medical Center in New Orleans, LA. All patients were HLA-typed, and a summary of their characteristics are provided in Table 5.

TABLE 5
COVID-19 patient characteristics and HLA types

| | | | | | | | | Days |
|---|---|---|---|---|---|---|---|---|
| | | | | | | | | after |
| | | | | | | | | diagnosis |
| | | | | SYMPTOM | | OXYGEN | VENTILATOR | until |
| | | | | DURATION | HOSPITALIZATION | USE | USE | blood |
| Patient ID | Age Range | Ethnicity | Gender | (Days): | REQUEIRED: | REQUIRED: | REQUIRED: | draw |
| 01-001 | 50-54 | Caucasian | M | 2 | No | No | No | 24 |
| 01-002 | 35-39 | Asian/Indian | F | 3 | No | No | No | 11 |
| 01-003 | 50-54 | Caucasian | F | 7 | No | No | No | 24 |
| 01-004 | 20-24 | Hispanic | F | 4 | No | No | No | 13 |
| 01-005 | 30-34 | Caucasian | F | 2 | No | No | No | 28 |
| 01-006 | 45-49 | Caucasian | F | 14 | No | No | No | 41 |
| 01-007 | 60-64 | Caucasian | M | 19 | Yes | Yes | Yes | 34 |
| 01-008 | 30-34 | Caucasian | F | 13 | No | No | No | 39 |
| 01-009 | 30-34 | Asian/Indian | F | 5 | No | No | No | 35 |
| 01-010 | 30-34 | Middle East | F | 3 | No | No | No | 28 |
| 01-011 | 50-54 | Caucasian | F | 21 | No | No | No | 29 |
| 01-012 | 60-64 | Caucasian | F | 5 | No | No | No | 37 |
| 01-013 | 65-69 | Caucasian | M | 14 | No | No | No | 44 |
| 01-014 | 55-59 | Hispanic | F | 19 | No | No | No | 30 |
| 01-015 | 40-45 | Caucasian | M | 21 | No | No | No | 52 |
| 01-016 | 55-59 | Caucasian | M | 21 | Yes | Yes | No | 46 |
| 01-019 | 45-49 | Caucasian | F | 15 | No | No | No | 45 |
| 01-020 | 50-54 | Caucasian | F | 21 | No | No | No | 47 |
| 01-021 | 55-59 | White | F | 22 | Yes | No | No | 56 |
| 01-022 | 25-29 | White | F | 33 | No | No | No | 51 |
| 01-023 | 25-29 | White | F | 23 | No | No | No | 46 |
| 01-024 | 45-49 | White | M | 5 | No | No | No | 62 |
| 01-025 | 60-64 | White | F | 22 | No | No | No | 53 |
| 01-026 | 45-49 | White | M | 0 | No | No | No | 52 |
| 01-027 | 56-59 | White | F | 15 | No | No | No | 52 |
| 01-028 | 35-39 | White | F | 10 | No | No | No | 57 |
| 01-029 | 45-49 | White | F | 12 | No | No | No | 59 |
| 01-030 | 20-24 | Hispanic | F | 15 | No | No | No | 55 |
| 01-031 | 45-49 | White | F | 18 | No | No | No | 60 |
| 01-032 | 30-35 | White | F | 16 | No | No | No | 56 |
| 01-033 | 55-59 | White | M | 28 | No | No | No | 49 |
| 01-034 | 45-49 | White | F | 14 | No | No | No | 43 |
| 01-035 | 65-69 | White | F | 16 | No | No | No | 55 |
| 01-036 | 60-64 | White | F | 21 | No | No | No | 61 |
| 01-037 | 50-54 | White | F | 11 | No | No | No | 48 |
| 01-038 | 35-39 | White | F | 17 | No | No | No | 53 |
| 01-039 | 30-34 | White | F | 31 | No | No | No | 74 |
| 01-040 | 40-44 | White | F | 5 | No | No | No | 78 |
| 01-041 | 60-64 | Hispanic | F | 36 | Yes | Yes | No | 57 |
| 01-042 | 60-64 | White | M | 30 | Yes | Yes | Yes | 60 |
| 01-043 | 45-49 | Hispanic | M | 21 | Yes | Yes | No | 63 |
| 01-044 | 55-59 | Asian | M | 29 | Yes | Yes | Yes | 81 |
| 01-045 | 30-34 | White | M | 15 | Yes | Yes | No | 88 |
| 01-046 | 50-54 | White | M | 7 | Yes | Yes | No | 79 |
| 01-047 | 50-54 | White | M | 14 | Yes | Yes | No | 80 |
| 01-048 | 50-54 | Non-Hispanic | M | 30 | Yes | Yes | No | 87 |
| 01-049 | 65-69 | Non-Hispanic | M | 24 | Yes | Yes | No | 96 |
| 01-050 | 55-59 | Caucasian | M | 24 | Yes | Yes | No | 92 |
| 01-051 | 65-69 | White | F | 22 | Yes | Yes | Yes | 111 |
| 02-001 | 50-54 | Black | F | 10 | No | No | No | 39 |
| 02-002 | 55-59 | White | F | 7 | No | No | No | 17 |
| 02-003 | 70-74 | White | M | 21 | Yes | Yes | No | 43 |
| 02-004 | 65-69 | White | F | 14 | No | No | No | 45 |
| 02-005 | 30-34 | White | F | 38 | No | No | No | 44 |
| 02-006 | 45-49 | Other | M | 18 | Yes | Yes | No | 45 |
| 02-007 | 40-44 | White | F | Unknown | No | No | No | 44 |
| 02-008 | 25-29 | White | M | Unknown | No | No | No | 44 |
| 02-009 | 45-49 | White | F | 36 | No | No | No | 44 |
| 02-010 | 35-39 | Black | F | 3 | No | No | No | 49 |
| 02-011 | 55-59 | Black | F | 9 | Yes | Yes | No | 49 |
| 02-012 | 65-69 | White | M | 10 | Yes | Yes | No | 51 |
| 02-013 | 40-44 | Other | F | 6 | No | No | No | 45 |
| 02-014 | 45-49 | Black | F | 15 | No | No | No | 37 |
| 02-015 | 35-39 | Other | F | 1 | No | No | No | 13 |
| 02-016 | 45-49 | Black | F | 20 | Yes | Yes | No | 59 |
| 02-017 | 75-79 | Black | F | 30 | Yes | Yes | No | 49 |
| 02-018 | 70-74 | White | F | 12 | No | No | No | 25 |
| 02-019 | 65-69 | White | M | 42 | Yes | Yes | No | 48 |
| 02-020 | 35-39 | Black | F | 1 | No | No | No | 44 |
| 02-021 | 35-39 | White | F | 22 | No | No | No | 50 |
| 02-022 | 70-74 | White | F | 14 | No | No | No | 64 |
| 02-022 | 70-74 | White | F | 14 | No | No | No | 64 |
| 02-023 | 65-69 | White | F | 3 | No | No | No | 53 |
| 02-024 | 70-74 | White | M | 76 | Yes | Yes | No | 72 |
| 02-025 | 60-64 | White | F | 72 | No | No | No | 75 |
| 02-026 | 60-64 | White | F | 34 | Yes | Yes | No | 30 |
| 02-027 | 65-69 | Black | F | 80 | Yes | Yes | No | 85 |

| Patient ID | HLA-A | HLA-A | HLA-B | HLA-B | HLA-C | HLA-C |
|---|---|---|---|---|---|---|
| 01-001 | A*02:01:01 | A*23:01:01 | B*49:01:01 | B*50:01:01 | C*06:02:01 | C*07:01:01 |
| 01-002 | A*24:02:01 | A*32:01:01 | B*15:17:01 | B*35:03:01 | C*07:01:02 | C*12:03:01 |
| 01-003 | A*01:01:01 | A*11:01:01 | B*40:02:01 | B*57:01:01 | C*02:02:02 | C*06:02:01 |
| 01-004 | A*02:01:01 | A*74:01:01 | B*15:03:01 | B*05:12:01 | C*02:10:01 | C*04:01:01 |
| 01-005 | A*01:01:01 | A*32:01:01 | B*08:01:01 | B*35:189 | C*04:01:01 | C*07:01:01 |
| 01-006 | A*03:01:01 | A*24:02:01 | B*18:01:01 | B*35:01:01 | C*04:01:01 | C*07:01:01 |
| 01-007 | A*01:01:01 | A*02:01:01 | B*07:04 | B*08:01:01 | C*07:01:01 | C*07:02:01 |
| 01-008 | A*02:01:01 | A*03:01:01 | Unknown | Unknown | C*03:03:01 | C*12:03:01 |
| 01-009 | A*01:01:01 | X | B*37:01:01 | B*57:01:01 | C*06:02:01 | X |
| 01-010 | A*01:01:01 | A*24:02:01 | B*49:01:01 | X | C*07:01:01 | X |
| 01-011 | A*24:02:01 | X | B*18:01:01 | B*35:03:01 | C*04:01:01 | C*05:01:01 |
| 01-012 | Unknown | Unknown | B*15:01:01 | B*40:01:02 | C*03:03:01 | C*03:04:01 |
| 01-013 | A*24:02:01 | A*26:01:01 | B*15:01:01 | B*40:01:02 | C*03:03:01 | C*03:04:01 |
| 01-014 | A*02:05:01 | A*30:04:01 | B*38:03:01 | B*51:01:01 | C*04:01:01 | C*16:01:01 |
| 01-015 | A*02:01:01 | A*24:02:01 | B*18:01:01 | B*35:03:01 | C*04:01:01 | C*07:01:01 |
| 01-016 | A*02:01:01 | A*32:01:01 | B*18:01:01 | B*50:01:01 | C*06:02:01 | C*12:03:01 |
| 01-019 | A*03:01:01 | A*11:01:01 | B*35:03:01 | B*51:01:01 | C*12:03:01 | C*14:02:01 |
| 01-020 | A*02:01:01 | A*03:01:01 | B*07:02:01 | B*27:02:01 | C*02:02:02 | C*07:02:01 |
| 01-021 | A*03:01:01 | A*30:01:01 | B*07:02:01 | B*13:02:01 | C*06:02:01 | C*07:02:01 |
| 01-022 | A*03:01:01 | A*33:03:01 | B*07:02:01 | B*58:01:01 | C*03:02:02 | C*07:02:01 |
| 01-023 | A*11:01:01 | A*68:01:01 | B*38:01:01 | B*31:01:01 | C*04:01:01 | C*15:04:01 |
| 01-024 | A*24:02:01 | A*33:03:01 | B*35:01:01 | B*40:01:02 | C*03:04:01 | C*04:01:01 |
| 01-025 | A*01:01:01 | A*02:01:01 | B*08:01:01 | B*39:06:02 | C*07:01:01 | C*07:02:01 |
| 01-026 | A*02:120 | A*32:01:01 | B*07:02:01 | B*18:01:01 | C*07:02:01 | C*12:03:01 |
| 01-027 | A*01:01:01 | A*03:01:01 | B*39:06:02 | B*56:01:01 | C*01:02:01 | C*07:02:01 |
| 01-028 | A*01:01:01 | A*68:02:01 | B*16:17:01 | B*57:01:01 | C*06:02:01 | C*07:01:02 |
| 01-020 | A*02:01:01 | A*03:01:01 | B*14:02:01 | B*15:01:01 | C*03:04:01 | C*08:02:01 |
| 01-030 | A*01:01:01 | A*24:02:01 | B*07:02:01 | B*06:01:01 | C*07:01:01 | C*07:02:01 |
| 01-031 | A*03:01:01 | A*24:02:01 | B*35:03:01 | B*39:06:02 | C*04:01:01 | C*07:02:01 |
| 01-032 | A*02:01:01 | A*86:01:01 | B*41:02:01 | B*51:01:01 | C*02:02:02 | C*17:03 |
| 01-033 | A*02:01:01 | A*24:02:01 | B*44:03:01 | B*50:01:01 | C*06:02:01 | C*16:01:01 |
| 01-024 | A*01:01:01 | A*11:01:01 | B*18:01:01 | B*35:01:01 | C*04:01:01 | C*07:01:01 |
| 01-035 | A*02:01:01 | A*30:01:01 | B*13:02:01 | B*35:02:01 | C*01:01:01 | C*08:02:01 |
| 01-036 | A*01:01:01 | A*23:01:01 | B*49:01:01 | B*52:01:01 | C*07:01:01 | C*12:02:02 |
| 01-037 | A*02:01:01 | X | B*07:02:01 | B*13:02:01 | C*06:02:01 | C*07:02:01 |
| 01-038 | A*02:01:01 | X | B*10:01:01 | B*49:01:01 | C*07:01:01 | X |
| 01-039 | A*01:01:01 | A*11:01:01 | B*35:01:01 | B*57:01:01 | C*01:01:01 | C*06:02:01 |
| 01-040 | A*01:01:01 | A*02:01:01 | B*15:01:01 | B*57:01:01 | C*03:04:01 | C*06:02:01 |
| 01-041 | A*01:01:01 | A*11:01:01 | B*08:01:01 | B*35:01:01 | C*04:01:01 | C*07:01:01 |
| 01-042 | A*01:01:01 | A*02:01:01 | B*37:01:01 | B*51:05 | C*04:01:01 | C*06:02:01 |
| 01-043 | A*02:01:01 | A*68:01:02 | B*07:02:01 | B*40:02:01 | C*03:06:01 | C*07:02:01 |
| 01-044 | A*26:01:01 | A*34:01:01 | B*40:01:02 | X | C*03:03:01 | C*03:04:01 |
| 01-045 | A*03:01:01 | A*11:01:01 | B*52:01:01 | B*57:01:01 | C*06:02:01 | C*12:02:02 |
| 01-046 | A*03:02:01 | A*30:01:01 | B*13:02:01 | B*55:01:01 | C*03:03:01 | C*06:02:01 |
| 01-047 | A*24:02:01 | A*68:01:01 | B*16:01:01 | B*35:02:01 | C*03:03:01 | C*04:01:01 |
| 01-048 | A*24:02:01 | A*31:01:02 | B*18:01:01 | B*40:04 | C*03:04:01 | C*12:03:01 |
| 01-049 | A*02:01:01 | A*03:01:01 | B*35:01:01 | B*51:01:01 | C*02:02:02 | C*04:01:01 |
| 01-050 | A*01:01:01 | A*23:01:01 | B*08:01:01 | B*49:01:01 | C*07:01:01 | X |
| 01-051 | Unknown | Unknown | Unknown | Unknown | Unknown | Unknown |
| 02-001 | A*29:02:01 | A*30:02:01 | B*51:01:01 | B*57:01:01 | C02:10:01 | C*16:01:01 |
| 02-002 | 4*03:01:01 | A*23:01:01 | B*07:02:01 | B*49:01:01 | C*07:01:01 | C*07:02:01 |
| 02-003 | A*26:01:01 | A*33:01:01 | B*14:02:01 | B*38:01:01 | C*08:02:01 | C*12:03:01 |
| 02-004 | A*03:01:01 | X | B*07:02:01 | B*14:02:01 | C*07:02:01 | C*06:02:01 |
| 02-005 | A*02:01:01 | X | B*41:02:01 | B*44:02:01 | C*05:01:01 | C*17:03 |
| 02-006 | A*02:01:01 | A*25:01:01 | B*15:01:01 | B*04:03:01 | C*03:03:01 | C*16:01:01 |
| 02-007 | A*11:01:01 | A*24:02:01 | B*38:02:01 | X | C*07:02:01 | C*07:27:01 |
| 02-008 | A*02:01:01 | A*11:01:01 | B*44:02:01 | B*52:01:01 | C*03:04:01 | C*12:02:02 |
| 02-009 | A*01:01:01 | A*24:02:13 | B*40:08:01 | B*44:03:02 | C*01:07:06 | C*15:02:01 |
| 02-010 | A*03:01:01 | A*23:01:01 | B*15:17:01 | B*53:01:01 | C*06:02:01 | C*16:01:01 |
| 02-011 | A*02:02:01 | A*30:02:01 | B*15:16:01 | B*42:01:01 | C*14:02:01 | C*17:01:01 |
| 02-012 | A*01:01:01 | A*11:01:01 | B*35:01:01 | B*35:03:01 | C*04:01:01 | X |
| 02-013 | A*24:02:01 | A*29:02:01 | B*14:02:01 | B*44:03:01 | C*02:02:02 | C*16:01:01 |
| 02-014 | A*30:01:01 | A*74:01:01 | B*15:03:01 | B*42:01:01 | C*02:10:01 | C*17:01:01 |
| 02-015 | A*02:01:01 | A*31:01:02 | B*35:01:01 | B*48:01:01 | C*02:10:01 | C*08:03:01 |
| 02-016 | A*30:02:01 | A*33:03:01 | B*15:03:01 | B*57:02:01 | C*02:10:01 | C*16:02 |
| 02-017 | A*02:01:01 | A*29:02:01 | B*13:02:01 | B*40:01:02 | C*03:01:01 | C*00:02:01 |
| 02-018 | A*33:03:01 | A*68:02:01 | B*13:02:01 | B*44:03:01 | C*06:02:01 | X |
| 02-019 | A*01:01:01 | A*02:01:01 | B*40:01:02 | B*57:01:01 | C*03:04:01 | C*06:02:01 |
| 02-020 | A*01:01:01 | A*11:01:01 | B*35:01:01 | B*57:01:01 | C*04:01:01 | C*08:02:01 |
| 02-021 | A*02:01:01 | X | B*15:01:01 | B*57:01:01 | C*03:03:01 | C*06:02:01 |
| 02-022 | A*02:01:01 | X | B*40:01:02 | B*56:01:01 | C*01:02:01 | C*03:04:01 |
| 02-022 | A*02:01:01 | X | B*40:01:02 | B*56:01:01 | C*01:02:01 | C*03:04:01 |
| 02-023 | A*02:01:01 | X | B*15:01:01 | B*44:02:01 | C*03:03:01 | C*05:01:01 |
| 02-024 | A*02:01:01 | A*68:01:02 | B*15:01:01 | B*44:02:01 | C*03:04:01 | C*07:04:01 |
| 02-025 | A*02:01:01 | A*29:02:01 | B*44:03:01 | B*51:01:01 | C*14:02:01 | C*16:01:01 |
| 02-026 | A*02:01:01 | X | B*35:01:01 | B*40:01:02 | C*03:04:01 | C*04:01:01 |
| 02-027 | A*02:02:01 | A*23:03:01 | B*49:01:01 | B*53:01:01 | C*04:01:01 | C*07:01:01 |

X: No additional haplotype (presumed homozygous)

[0362] As HLA A*02:01 is the most common MHC allele world-wide, nine HLA-A*02:01 patients were selected with a broad range of clinical presentations: six had mild symptoms and were not hospitalized, two required supplemental oxygen, and one required invasive ventilation. In each case, bulk memory CD8+ T cells (CD8+, CD45RO+, CD45RA−, CD57−) were collected by negative selection, the cells were expanded with antigen-independent stimulation (anti-CD3), and the cells were screened against the SARS-CoV-2 library. Target cells expressing only HLA-A*02:01 were used to provide unambiguous MHC restriction of discovered antigens.

[0363] SARS-CoV-2 screening results for one representative patient and one COVID-19-negative healthy control (blood collected prior to 2020) are shown in FIG. 4C. Reactivity to at least eight regions of SARS-CoV-2 proteins in the convalescent patient was found and none in the control. Importantly, reproducible performance of four technical screen replicates, internal nucleic acid barcodes, and overlapping protein fragments, collectively, was observed, indicating robust screen performance. Additionally, reactivity to the control CMV epitope (NLVPMVATV) was detected in the healthy control, who was known to be CMV-positive, and reactivity to two EBV epitopes in both the COVID-19 patient and the healthy control were detected (FIG. 4C).

[0364] Next, the screen results for the full set of HLA-A*02:01 patients was examined and reactivity to specific segments of SARS-CoV-2 ORFs was detected in 8 of 9 patients (FIG. 5A). Strikingly, it was found that specific fragments are recurrently recognized by the T cells of multiple patients. For example, ORF1ab aa 3881-3900 and S aa 261-280 were each recognized by 7 of 9 patients (FIG. 5A). Overall, six regions were identified that were targeted by CD8+ T cells from at least three different patients. In addition to being shared across patients, these regions were among the strongest responses observed in each patient. Based on the results, it is believed that the CD8+ T cell response to SARS-CoV-2 is largely shaped by a limited number of recurrently targeted, immunodominant epitopes.

[0365] It was next sought to identify the precise peptide epitopes underlying the shared T cell reactivities detected in the screens. The overlapping design of the antigen library allowed the mapping of T cell reactivities to specific 20-aa segments. The NetMHC4.0 prediction algorithm (Andreatta and Nielsen (2016) Bioinform. 32:511-517; Nielsen et al. (2003) Prot. Sci. 12:1007-1017) was then used to identify high-affinity HLA-A*02:01 peptides in each pre-identified 20-aa stretch. A representative example of a predicted epitope and the corresponding screen data are shown in FIG. 5B. Additional epitopes are shown in FIG. 6.

[0366] Notably, the fragments scoring in the screens were enriched for high-affinity HLA-binding peptides compared to the library as a whole, further verifying their biological relevance (FIG. 7). To visualize the results across all nine patients, the screening data were collapsed into a single value (mean of screen replicates and redundant tiles), revealing a set of six predicted epitopes that were recurrently recognized by three or more patients (FIG. 5C and Table 6).

TABLE 6
List of immunodominant T cell epitopes identified in convalescent COVID-19
patients

| | | Peptide | Full | | | Affinity | % of Pts | % of Pts |
|---|---|---|---|---|---|---|---|---|
| | Allele | Name | Peptide | Start | End | (nM) | (Screen) | (Tetramer) |
| 1 | A*02 | [symbol] | ORF1ab | [symbol] | [symbol] | 17.7 | 88.9 | 77.8 |
| 2 | A*02 | [symbol] | S | 269 | 277 | 5.4 | 77.6 | 44.4 |
| 3 | A*02 | [symbol] | ORF3a | 139 | 147 | 3.1 | [symbol] | 55.5 |
| 4 | A*02 | [symbol] | ORF1ab | 4092 | 4102 | 7.8 | [symbol] | 25.9 |
| 5 | A*02 | [symbol] | N | 222 | 230 | [symbol] | 33.3 | 22.2 |
| 6 | A*02 | [symbol] | ORF1ab | 906 | 916 | 22.2 | 44.4 | 18.5 |
| 7 | A*01 | [symbol] | ORF3a | 207 | 215 | 3.2 | 100 | |
| 8 | A*01 | [symbol] | ORF1ab | 1637 | 1646 | 7.2 | 100 | |
| 9 | A*01 | [symbol] | ORF1ab | 1321 | 1329 | 6.1 | 80 | |
| 10 | A*01 | [symbol] | M | 171 | 179 | 16.7 | [symbol] | |
| 11 | A*01 | [symbol] | ORF1ab | 4163 | 4172 | 5.3 | 100 | |
| 12 | A*01 | [symbol] | ORF1ab | 4082 | 4091 | [symbol] | [symbol] | |
| 13 | A*01 | [symbol] | ORF1ab | [symbol] | 5138 | [symbol] | 40 | |
| 14 | A*01 | [symbol] | ORF1ab | 3437 | 3445 | 6 | 40 | |
| 15 | A*03 | [symbol] | N | 361 | 369 | 20.8 | 100 | |
| 16 | A*03 | [symbol] | S | 378 | 386 | 152.6 | 100 | |
| 17 | A*03 | [symbol] | ORF1ab | 807 | 816 | 19.8 | 40 | |
| 18 | A*03 | [symbol] | ORF1ab | 282 | [symbol] | 113.2 | 40 | |
| 19 | A*11 | [symbol] | N | 361 | 369 | .3 | 100 | |
| 20 | A*11 | [symbol] | ORF1ab | 4216 | 4224 | 160.5 | 60 | |
| 21 | A*11 | [symbol] | N | 134 | 143 | 55.5 | 80 | |
| 22 | A*11 | [symbol] | N | 311 | 319 | 14.4 | 40 | |
| 23 | A*11 | [symbol] | M | 171 | [symbol] | 7.9 | 60 | |
| 24 | A*24 | [symbol] | S | 1208 | 1216 | 13.2 | 60 | |
| 25 | A*24 | [symbol] | ORF3a | 112 | 120 | 47.4 | 80 | |
| 26 | A*24 | [symbol] | ORF1ab | 5721 | 5729 | 206 | 40 | |
| 27 | B*07 | [symbol] | N | 106 | 113 | 6.3 | 80 | |
| 28 | B*07 | [symbol] | ORF1ab | 2949 | 2956 | 56.9 | 80 | |
| 29 | B*07 | [symbol] | ORF1ab | 5916 | 5924 | 5.1 | 20 | |

[symbol]

indicates data missing or illegible when filed

[0367] Peptides corresponding to each predicted epitope were then synthesized to further validate the results. All six epitopes induced peptide-dependent T-cell activation as determined by interferon-gamma (IFNg) secretion (FIG. 5D) and CD137 upregulation (FIG. 8). Both IFN gamma (IFNg) secretion and CD137 upregulation correlate with the fold enrichment in the TScan screen (FIG. 8 and FIG. 9). As further validation, MHC tetramers with the six peptides were constructed and used to stain the memory CD8+ T cells of all nine A*02:01 patients, as well as an additional 18 A*02:01 patients that had not been previously screened. Positive tetramer staining was observed in a subset of patients for all six peptides, including patients who had not been screened (FIG. 5E). Notably, the magnitude of enrichment in the screens correlated well with the frequency of cognate T cells in the patient samples (r=0.73, p<0.0001) (FIG. 5F), indicating that the screens detected the targets of T cells that are present at ≥0.1% frequency in the memory CD8+ T cell pool. Remarkably, the three most commonly recognized epitopes discovered—KLW, YLQ, and LLY—are each recognized by 67% of the patients screened, and all nine patients had a detectable response to at least one of the top three epitopes (FIG. 5G). A similar analysis of the tetramer staining data in all 27 A*02:01 patients showed recognition of at least one of these epitopes in 23 of 27 patients (85% of patients) (FIG. 5H). Taken together, the analysis of HLA-A*02:01 patients demonstrates the utility of the T-Scan approach in mapping SARS-CoV-2 T cell epitopes and reveals that patient T cells largely target a limited set of shared immunodominant epitopes.

[0368] CD8+ T cell responses are profoundly shaped by host MHC alleles, which restrict the scope of displayed peptides that serve as potential antigens. To determine whether the narrow set of immunodominant epitopes identified for HLA-A*02:01 reflects a general feature of anti-SARS-CoV-2 CD8+ T cell responses, memory CD8+ T cell reactivities were mapped for five additional common MHC alleles: HLA-A*01:01, HLA-A*03:01, HLA-A*11:01, HLA-A*24:02, and HLA-B*07:02. Analysis of this set of HLA alleles provides a broad perspective on the nature of anti-SARS-CoV-2 CD8+ T cell immunity, as ˜90% of the U.S. population and ˜85% of the world population is positive for at least one of the six alleles examined (Maiers et al. (2007) Hum. Immunol. 68:779-788; Gonzalez-Galarza (2020) Nucl. Acids Res. 48:D783-D788). For each allele, five HLA+ convalescent COVID-19 patients were selected and their memory CD8+ T cells were screened against the SARS-CoV-2 library in target cells expressing only the single HLA of interest. As with A*02:01 patients, robust T cell recognition of multiple regions in the SARS-CoV-2 ORFeome for patients with each HLA allele was found (FIG. 10) and it was confirmed that the scoring fragments were enriched for predicted high-affinity MHC binders for each respective allele (FIG. 7). Strikingly, recurrent recognition of specific protein fragments by most or all patients for each allele was again observed (FIG. 11A), indicating a narrow set of shared immunodominant responses. As described above, screening data and NetMHC4.0 MHC binding analyses were combined to map the precise epitopes underlying the top hits from the screens, and these peptides were validated using representative IFNg secretion assays (FIG. 11B) and CD137 upregulation assays (FIG. 8). Three or more recurrently recognized epitopes on each screened MHC allele were identified and it was determined that 92% of patients recognized at least one of the top three allele-specific epitopes (FIG. 11C). Collectively, a set of 29 CD8+ T cell epitopes that were shared among COVID-19 patients with the same HLA type were mapped and validated (Table 6). Most strikingly, it was found that the CD8+ T cell response restricted by each of six common HLA alleles contained a limited number of recurrently targeted, immunodominant epitopes.

[0369] The unbiased antigen mapping performed allowed for the interrogation of various features of CD8+ T cell immunity to SARS-CoV-2. First, the scope of recognized viral proteins was examined. Broad reactivity to many SARS-CoV-2 proteins, including ORF1ab, S, N, M, and ORF3a, was observed (FIG. 12A). Notably, only three of the 29 epitopes were located in the S protein, with most (15 of 29) located in ORF1ab and the highest density of epitopes located in the N protein (FIG. 12A and FIG. 12B). When taken in aggregate, the results are largely consistent with previous ORF-level analyses using peptide pools (Grifoni et al. (2020) Cell 181:1489-1501; Le Bert et al. (2020) “SARS-CoV-2-specific T cell immunity in cases of COVID-19 and SARS, and uninfected controls” Nature (doi: 10.1038/s41586-020-2550-z) available at nature.com/articles/s41586-020-2550-z; Braun et al. (2020) “Presence of SARS-CoV-2 reactive T cells in COVID-19 patients and healthy donors” medRxiv (doi.org/10.1101/2020.04.17.20061440) available at medrxiv.org/content/10.1101/2020.04.17.20061440v1; Thieme et al. (2020) “The SARS-CoV-2 T-cell immunity is directed against the spike, membrane, and nucleocapsid protein and associated with COVID 19 severity” medRxiv (doi.org/10.1101/2020.05.13.2100636) available at medrxiv.org/content/10.1101/2020.05.13.20100636v1; Altmann and Boyton (2020) Science Immunol. 5:eabd6160). However, the approaches described and carried out herein provided an increased level of granularity that allowed for the identification of specific epitope sequences and highlighted allele-specific differences. For example, immunodominant epitopes in the S protein were observed for HLA-A*02:01, HLA-A*03:01, and HLA-A*24:02, but not for HLA-A*01:01, HLA-A*11:01, or HLA-B*07:02. Only one recurrent response in the receptor-binding domain (RBD) of the S protein (KCY on HLA-A*03:01) was detected.

[0370] It was next asked how the CD8+ T cell response to SARS-CoV-2 intersected with the emerging genetic diversity of the virus. Recent analyses, which examined the genome sequences of over 10,000 isolates of SARS-CoV-2 sampled from 68 different countries, identified a set of 28 non-synonymous coding mutations detected in at least 1% of strains (Koyama et al. (2020) Bulletin of the World Health Organization (WHO) 98:495-504). Only one of these mutations (M protein T175M; detected in 2% of strains) was found in the immunodominant epitope identified (HLA-A*01:01 ATS and HLA-A*11:01 ATS). These results indicate that the recognition of the epitopes identified and described herein are not significantly influenced by the SARS-CoV-2 genetic diversity observed thus far.

[0371] Identifying specific SARS-CoV-2 epitopes allowed for the examination of the features of the T cell receptors (TCRs) recognizing these immunodominant epitopes. Tetramers loaded with three HLA-A*02:01 epitopes (KLW, YLQ, and LLY) were used to stain and sort antigen-specific memory CD8+ T cells from the initial nine HLA-A*02:01-positive convalescent COVID-19 patients. 10× Genomics single-cell sequencing was then used to identify the paired TCR alpha and TCR beta chains expressed by these T cells. Paired clonotypes reactive to each antigen in 5/9 (KLW, ALW) or 6/9 (YLQ) patients. For a majority of responses (9/16), oligoclonal recognition by five or more distinct clonotypes was detected. Next, the TCR sequences themselves were identified. Striking similarity among the TCRs recognizing each antigen in terms of Vα gene segment usage and, to a lesser extent, Vβ usage (FIG. 12C) was observed. Specifically, 26/61 KLW-reactive clonotypes used TRAV38-2/DV8, 24/31 YLQ-reactive clonotypes used TRAV12-1, and 14/29 LLY-reactive clonotypes used TRAV8-1. Notably, these dominant V_{α} genes were used across all of the patients for whom reactive clonotypes were identified. Taken together, these data indicate that the epitopes identified are recognized by TCRs with shared sequence features and raise the possibility that their immunodominance is shaped by the structural requirements for high-affinity TCR binding to these peptide-MHC complexes. Representative TCR sequences determined to bind indicated immunodominant epitopes in the context of indicated HLA alleles are shown in Tables 1A-01 to 1A-05, 1B-01 to 1B-04, 1C-01 to 1C-03, 1D-01 to 1D-03, 1E-01 to 1E-02, and 1F-01 to 1F-03.

[0372] Another important question is how pre-existing immunity to other coronaviruses shapes the CD8+ T cell response to SARS-CoV-2. There are four commonly circulating coronaviruses, OC43, HKU1, NL63, and 229E, and cross-reactive responses to these viruses have been theorized as a potential protective factor during SARS-CoV-2 infection (Cui et al. (2019) Nat. Rev. Microbiol. 17:181-192).

[0373] Moreover, understanding the extent of cross-reactivity has implications for accurately monitoring T cell responses to SARS-CoV-2 and for optimizing vaccine design. If the immune response to SARS-CoV-2 is shaped by pre-existing CD8 T cells that recognize other coronaviruses, it was hypothesized that COVID-19 patients should have reactivity to the regions of the other coronaviruses that correspond to the SARS-CoV-2 immunodominant epitopes identified and described herein. Accordingly, T-cell reactivity to SARS-CoV-2, SARS-CoV, and all four endemic coronaviruses was examined in all 34 genome-wide screens conducted—across all patients and all MHC alleles (FIG. 13A). Broad reactivity to the corresponding epitopes in SARS-CoV in over half of cases was observed, which is consistent with a recent study reporting the existence of long-lasting memory T cells cross-reactive to SARS-CoV-2 in patients that had been infected in SARS-CoV during the 2002/2003 SARS outbreak (Le Bert et al. (2020) “SARS-CoV-2-specific T cell immunity in cases of COVID-19 and SARS, and uninfected controls” Nature (doi: 10.1038/s41586-020-2550-z) available at nature.com/articles/s41586-020-2550-z). In contrast, however, almost no reactivity to OC43 and HKU1 (2/29 dominant epitopes) and no reactivity to NL63 and 229E was detected. Beyond the 29 epitopes, no reproducible cross-reactivity to any other regions of the four endemic coronaviruses was detected, further indicating that prior exposure to these viruses is unlikely to provide T cell-based protection from SARS-CoV-2.

[0374] Identification and description herein of specific immunodominant epitopes in SARS-CoV-2 allowed for the provision of an explanation for this lack of cross-reactivity. In some cases, the corresponding region is poorly conserved in the other coronaviruses and high-affinity binding to MIHC is lost (see, for example, the corresponding regions of the KLW epitope in NL63 and 229E) (FIG. 13B). In other cases, the corresponding epitopes are still predicted to bind with high affinity to MHC, but SARS-CoV-2-reactive T cells do not recognize them (see, for example, the corresponding regions of the KLW epitope in OC43 and HKU10 (FIG. 13B).

[0375] In one case, a strong cross-reactive response was identified. The HLA B*07:02 epitope SPR, which lies in the N protein, is highly conserved across betacoronaviruses and all four of the patients that demonstrated reactivity to SPR also exhibited reactivity to the corresponding epitopes in OC43 and HKU1 (FIG. 13C). Overall, however, it was determined herein that the CD8+ T cell response to SARS-CoV-2 is not significantly shaped by pre-existing immunity to endemic coronaviruses.

[0376] Based on the foregoing, natural CD8+ T cell response to SARS-CoV-2 were analyzed using an unbiased, genome-wide method that enabled identification of the precise epitopes presented on MHC and functionally recognized by memory CD8+ T cells in convalescent patient blood. All 29 epitopes identified were validated using independent functional assays, and the A*02:01-restricted epitopes were further validated in an independent test set of 18 patients. Overall, a core set of 3-8 immunodominant epitopes for each MHC allele was found. These epitopes were recurrently targeted across patients, but also represented the strongest hits in the screens within each patient, indicating that they are both shared and dominant. Moreover, these epitopes are almost entirely specific to SARS-CoV-2/SARS-CoV, indicating that the T cell response to SARS-CoV-2 is not significantly shaped by pre-existing immunity to the four endemic coronaviruses that cause the common cold.

[0377] The results described herein contrast with in silico studies predicting epitopes presented by HLA alleles. For example, hundreds of SARS-CoV-2-derived peptides are predicted to bind with high affinity to HLA-A*02:01 (Nguyen et al. (2020) “Human leukocyte antigen susceptibility map for SARS-CoV-2” J. Virol. (10.1128/JVI.00510-20) available at vi.asm.org/content/94/13/e00510-20), yet the results of actual T-cell responses described herein reveal eight or fewer dominant A*02:01-restricted targets per patient. Based on the strong correlation observed between the screening data and tetramer staining, it is estimated that the screens detect T cell specificity that is present at a frequency of ≥0.10% in the pool of memory cells. Although there may be other virus-specific T cells below this frequency, those detected represent the most expanded clones and so are likely to be most important in providing protection from future infection. Generating a T cell response depends not only on high-affinity binding of the peptide to the MHC, but also on efficient processing and loading of the peptide, as well as efficient recognition of the peptide by TCRs in the naïve repertoire of the patient. Indeed, our clonotype analysis of the three most dominant A*02:01 epitopes (KLW, YLQ, and LLY) revealed that the T cell response is oligoclonal, but dominated by specific T cell receptor Va and Vb chains that are similarly shared across patients. This highlights the importance of experimentally identifying immunodominant epitopes in an unbiased fashion.

[0378] The results described herein also highlighted differences across MHC alleles in the total number of recognized epitopes and the proteins in which they reside. This emphasizes the importance of searching for MHC associations with disease outcome and of detailed tracking of MHC alleles in immune monitoring of vaccine trials. Previous studies using megapools of peptides spanning each of the ORFs in SARS-CoV-2 showed CD4+ and CD8+ T cell responses in all COVID-19 convalescent patients (Grifoni et al. (2020) Cell 181:1489-1501; Le Bert et al. (2020) “SARS-CoV-2-specific T cell immunity in cases of COVID-19 and SARS, and uninfected controls” Nature (doi: 10.1038/s41586-020-2550-z) available at nature.com/articles/s41586-020-2550-z; Braun et al. (2020) “Presence of SARS-CoV-2 reactive T cells in COVID-19 patients and healthy donors” medRxiv (doi.org/10.1101/2020.04.17.20061440) available at medrxiv.org/content/10.1101/2020.04.17.20061440v1; Thieme et al. (2020) “The SARS-CoV-2 T-cell immunity is directed against the spike, membrane, and nucleocapsid protein and associated with COVID 19 severity” medRxiv (doi.org/10.1101/2020.05.13.20100636) available at medrxiv.org/content/10.1101/2020.05.13.20100636v1; Altmann and Boyton (2020) Science Immunol. 5:eabd6160). Although most of the reactivity to the S protein came from CD4+ T cells, some reactivity to the S protein was also observed in CD8+ T cells. Consistent with these findings, 3 immunodominant epitopes in the S protein were identified. Overall, however, it was found that 90% of the CD8+ T cell reactivity was directed at epitopes outside the S protein. Grifoni et al. (2020) Cell 181:1489-1501 also showed reactivity to the M protein, while Le Bert et al. (2020) “SARS-CoV-2-specific T cell immunity in cases of COVID-19 and SARS, and uninfected controls” Nature (doi: 10.1038/s41586-020-2550-z) available at nature.com/articles/s41586-020-2550-z found reactivity to nsp7 and nsp13, which derive from ORF1ab. Specific epitopes within these proteins, as well as their MHC restriction, are now described herein. In contrast to peptide pool studies that found T cells in unexposed individuals that were cross reactive to SARS-CoV-2, however, the results described herein demonstrate that the immunodominant epitopes are largely specific for SARS-CoV-2 and are not shared with other coronaviruses. If pre-existing memory responses to other coronaviruses were able to efficiently recognize SARS-CoV-2, then the reacting T cells would be expected to expand and their targets would be detected in the screens described herein. As a result, the paucity of cross-reactive responses found argues against substantial protection against SARS-CoV-2 stemming from CD8+ T cell immunity to the four coronaviruses that cause the common cold.

[0379] The additional level of granularity provided by identifying the specific epitopes as described herein also provides the necessary tools for tracking SARS-CoV-2-specific CD8+ T cell responses in exposed individuals or in subjects participating in vaccine trials. Diagnosis of previous exposure to SARS-CoV-2 currently relies on serological testing for antibodies that wane with time. A recent study found that IgG responses to SARS-CoV-2 decline rapidly in >90% of infected individuals in the 2-3-month period post infection, with 40% of asymptomatic individuals turning seronegative (Long et al. (2020) “Clinical and immunological assessment of asymptomatic SARS-CoV-2 infections” Nat. Med. (10.1038/s41591-020-0965-6) available at nature.com/articles/s41591-020-0965-6). In contrast, there are indications that memory T cells may persist longer, as T cells specific for SARS-CoV were detected 11 or even 17 years after the 2003 SARS outbreak (Le Bert et al. (2020) “SARS-CoV-2-specific T cell immunity in cases of COVID-19 and SARS, and uninfected controls” Nature (doi: 10.1038/s41586-020-2550-z) available at nature.com/articles/s41586-020-2550-z; Ng et al. (2016) Vaccine 34:2008-2014). Based on the results described herein, it is believed that detecting SARS-CoV-2-specific CD8+ T cells potentially can be performed at large scale using an IFNg release assay similar to commercial assays used for tuberculosis testing (Albert-Vega et al. (2018) Front. Immunol. 9:2367). Although the frequency of SAR-CoV-2-specific memory T cells decreases in the weeks following recovery from an acute infection, the remaining pool of memory T cells can be expanded in vitro by stimulation with peptide epitopes, as previously demonstrated for the detection of T cells to SARS-CoV (Le Bert et al. (2020) “SARS-CoV-2-specific T cell immunity in cases of COVID-19 and SARS, and uninfected controls” Nature (doi: 10.1038/s41586-020-2550-z) available at nature.com/articles/s41586-020-2550-z; Ng et al. (2016) Vaccine 34:2008-2014). In contrast to serological testing for antibodies, this allows for a diagnostic test that can detect prior exposure to COVID-19 for a prolonged period following viral infection. It also allows for determination of T cell reactivity to any or all of the immunodominant epitopes as an indicator of disease severity or protection against future infection.

[0380] The results described herein also have significant implications for vaccine development. A majority of the T cell responses described herein fall outside of the S protein. Only one is in the receptor binding domain of S. Accordingly, it is believed that more robust CD8+ T cell responses across diverse patients could be generated by incorporating additional antigens into vaccine designs. For example, specific regions of the ORF1ab protein that could be used are provided. The smaller proteins, N, M, and ORF3a, are also believed to be strongly and broadly immunogenic. The epitopes identified and described herein carry the additional benefit that they occur in regions that have thus far been subject to minimal genetic variation. While there does not appear to be significant cross-reactivity with other coronaviruses, the few regions identified that are highly conserved and immunogenic are believed to be of specific interest because they are believed to confer protection across different coronaviruses. Studying these epitopes in prospective tracking studies can further confirm whether previous exposure to other coronaviruses elicits protective or pathological immune responses.

[0381] The determination that the immunodominant epitopes for CD8+ T cells reside largely outside the spike protein raises the possibility that many of the S protein-directed vaccines currently under development may elicit an insufficient CD8+ T cell response. It should be noted that a recent vaccine candidate, BNT162b1, an RNA vaccine encoding the receptor binding domain of the S protein, elicited CD8+ T cell responses in 80% of participants (Mulligan et al. (2020) “Phase 1/2 study to describe the safety and immunogenicity of a COVID-19 RNA vaccine candidate (BNT162b1) in adults 18 to 55 years of age: interim report” medRxiv (doi.org/10.1101/2020.06.30.20142570) available at medrxiv.org/content/10.1101/2020.06.30.20142570v1). Given that only a single A*03:01-restricted immunodominant epitope in the RBD was observed, it is unlikely that the observed responses in this study are all directed at this epitope. Additional immunodominant epitopes may be presented by MHC alleles not examined, although it is unlikely that a large number of rare alleles display RBD-derived immunodominant epitopes while the six most prevalent alleles collectively feature only one. A more likely explanation is that vaccinating with a high dose of an RNA-based vaccine encoding a single protein domain could potentially elicit CD8+ T cells that recognize subdominant epitopes. It is believed that vaccines like this would benefit from additional peptides/proteins that elicit the naturally occurring shared epitopes.

[0382] Overall, SARS-CoV-2 TCRs were identified and described and the results described herein indicate that memory CD8+ T cell responses in convalescent COVID-19 patients are directed against a small set of immunodominant epitopes that are shared across the majority of patients with the same HLA types. These epitopes are largely outside the spike protein, the current target of the most advanced vaccines against SARS-CoV-2. These findings allow for the development of diagnostic tests for previous exposure to SARS-CoV-2 and support the inclusion of other antigens in vaccines against this virus that are more likely to mimic the natural CD8+ T cell response to SARS-CoV-2.

### INCORPORATION BY REFERENCE

[0383] All publications, patents, and patent applications mentioned herein are hereby incorporated by reference in their entirety as if each individual publication, patent or patent application was specifically and individually indicated to be incorporated by reference. In case of conflict, the present application, including any definitions herein, will control.

[0384] Also incorporated by reference in their entirety are any polynucleotide and polypeptide sequences which reference an accession number correlating to an entry in a public database, such as those maintained by The Institute for Genomic Research (TIGR) on the World Wide Web at tigr.org and/or the National Center for Biotechnology Information (NCBI) on the World Wide Web at ncbi.nlm.nih.gov.

### EQUIVALENTS AND SCOPE

[0385] The details of one or more embodiments encompassed by the present invention are set forth in the description above. Although representative, exemplary materials and methods have been described above, any materials and methods similar or equivalent to those described herein may be used in the practice or testing of embodiments encompassed by the present invention. Other features, objects and advantages related to the present invention are apparent from the description. Unless defined otherwise, all technical and scientific terms used herein have the same meaning as commonly understood by one of ordinary skill in the art to which the present invention belongs. In the case of conflict, the present description provided above will control.

[0386] Those skilled in the art will recognize or be able to ascertain using no more than routine experimentation, many equivalents to the specific embodiments encompassed by the present invention described herein. The scope encompassed by the present invention is not intended to be limited to the description provided herein and such equivalents are intended to be encompassed by the appended claims.

[0387] It is also noted that the term “comprising” is intended to be open and permits but does not require the inclusion of additional elements or steps. When the term “comprising” is used herein, the term “consisting of” is thus also encompassed and disclosed.

[0388] Where ranges are given, endpoints are included. Furthermore, it is to be understood that unless otherwise indicated or otherwise evident from the context and understanding of one of ordinary skill in the art, values that are expressed as ranges may assume any specific value or subrange within the stated ranges in different embodiments encompassed by the present invention, to the tenth of the unit of the lower limit of the range, unless the context clearly dictates otherwise.

[0389] In addition, it is to be understood that any particular embodiment encompassed by the present invention that falls within the prior art may be explicitly excluded from any one or more of the claims. Since such embodiments are deemed to be known to one of ordinary skill in the art, they may be excluded even if the exclusion is not set forth explicitly herein. Any particular embodiment of the compositions encompassed by the present invention (e.g., any antibiotic, therapeutic or active ingredient; any method of production; any method of use; etc.) may be excluded from any one or more claims, for any reason, whether or not related to the existence of prior art.

[0390] It is to be understood that the words which have been used are words of description rather than limitation, and that changes may be made within the purview of the appended claims without departing from the true scope and spirit encompassed by the present invention in its broader aspects.

[0391] While the present invention has been described at some length and with some particularity with respect to several described embodiments, it is not intended that it should be limited to any such particulars or embodiments or any particular embodiment, but it is to be construed with references to the appended claims so as to provide the broadest possible interpretation of such claims in view of the prior art and, therefore, to effectively encompass the intended scope encompassed by the present invention.

LENGTHY TABLES
The patent application contains a lengthy table section. A copy of the table is available in electronic form from the USPTO web site (https://seqdata.uspto.gov/?pageRequest=docDetail&DocID=US20230287079A1). An electronic copy of the table will also be available from the USPTO upon request and payment of the fee set forth in 37 CFR 1.19(b)(3).

What is claimed is:

1. A binding protein comprising:
a) a T cell receptor (TCR) alpha chain CDR sequence with at least about 80% identity to a TCR alpha chain CDR sequence selected from the group consisting of TCR alpha chain CDR sequences listed in Tables 1A-01 to 1A-05, 1B-01 to 1B-04, 1C-01 to 1C-03, 1D-01 to 1D-03, 1E-01 to 1E-02, and 1F-01 to 1F-03; and/or
b) a TCR beta chain CDR sequence with at least about 80% identity to a TCR beta chain CDR sequence selected from the group consisting of TCR beta chain CDR sequences listed in Tables 1A-01 to 1A-05, 1B-01 to 1B-04, 1C-01 to 1C-03, 1D-01 to 1D-03, 1E-01 to 1E-02, and 1F-01 to 1F-03, wherein the binding protein is capable of binding to a SARS-CoV-2 immunodominant peptide-MHC (pMHC) complex, optionally wherein the binding affinity has a K_{d} less than or equal to about 5×10⁻⁴ M.

2. A binding protein comprising:
a) a TCR alpha chain variable (V_{α}) domain sequence with at least about 80% identity to a TCR V_{α} domain sequence selected from the group consisting of TCR Vα domain sequences listed in Tables 1A-01 to 1A-05, 1B-01 to 1B-04, 1C-01 to 1C-03, 1D-01 to 1D-03, 1E-01 to 1E-02, and 1F-01 to 1F-03; and/or
b) a TCR beta chain variable (V_{β}) domain sequence with at least about 80% identity to a TCR V_{β} domain sequence selected from the group consisting of TCR V_{β} domain sequences listed in Tables 1A-01 to 1A-05, 1B-01 to 1B-04, 1C-01 to 1C-03, 1D-01 to 1D-03, 1E-01 to 1E-02, and 1F-01 to 1F-03, wherein the binding protein is capable of binding to a SARS-CoV-2 immunodominant peptide-MHC (pMHC) complex, optionally wherein the binding affinity has a K_{d} less than or equal to about 5×10⁻⁴ M.

3. A binding protein comprising:
a) a TCR alpha chain sequence with at least about 80% identity to a TCR alpha chain sequence selected from the group consisting of TCR alpha chain sequences listed in Tables 1A-01 to 1A-05, 1B-01 to 1B-04, 1C-01 to 1C-03, 1D-01 to 1D-03, 1E-01 to 1E-02, and 1F-01 to 1F-03; and/or
b) a TCR beta chain sequence with at least about 80% identity to a TCR beta chain sequence selected from the group consisting of TCR beta chain sequences listed in Tables 1A-01 to 1A-05, 1B-01 to 1B-04, 1C-01 to 1C-03, 1D-01 to 1D-03, 1E-01 to 1E-02, and 1F-01 to 1F-03, wherein the binding protein is capable of binding to a SARS-CoV-2 immunodominant peptide-MHC (pMHC) complex, optionally wherein the binding affinity has a K_{d} less than or equal to about 5×10⁻⁴ M.

4. A binding protein comprising:
a) a TCR alpha chain CDR sequence selected from the group consisting of TCR alpha chain CDR sequences listed in Tables 1A-01 to 1A-05, 1B-01 to 1B-04, 1C-01 to 1C-03, 1D-01 to 1D-03, 1E-01 to 1E-02, and 1F-01 to 1F-03; and/or
b) a TCR beta chain CDR sequence selected from the group consisting of TCR beta chain CDR sequences listed in Tables 1A-01 to 1A-05, 1B-01 to 1B-04, 1C-01 to 1C-03, 1D-01 to 1D-03, 1E-01 to 1E-02, and 1F-01 to 1F-03, wherein the binding protein is capable of binding to a SARS-CoV-2 immunodominant peptide-MHC (pMHC) complex, optionally wherein the binding affinity has a K_{d} less than or equal to about 5×10⁻⁴ M.

5. A binding protein comprising:
a) a TCR alpha chain variable (V_{α}) domain sequence selected from the group consisting of TCR V_{α} domain sequences listed in Tables 1A-01 to 1A-05, 1B-01 to 1B-04, 1C-01 to 1C-03, 1D-01 to 1D-03, 1E-01 to 1E-02, and 1F-01 to 1F-03; and/or
b) a TCR beta chain variable (V_{β}) domain sequence selected from the group consisting of TCR V_{β} domain sequences listed in Tables 1A-01 to 1A-05, 1B-01 to 1B-04, 1C-01 to 1C-03, 1D-01 to 1D-03, 1E-01 to 1E-02, and 1F-01 to 1F-03, wherein the binding protein is capable of binding to a SARS-CoV-2 immunodominant peptide-MHC (pMHC) complex, optionally wherein the binding affinity has a K_{d} less than or equal to about 5×10⁻⁴ M.

6. A binding protein comprising:
a) a TCR alpha chain sequence selected from the group consisting of TCR alpha chain sequences listed in Tables 1A-01 to 1A-05, 1B-01 to 1B-04, 1C-01 to 1C-03, 1D-01 to 1D-03, 1E-01 to 1E-02, and 1F-01 to 1F-03; and/or
b) a TCR beta chain sequence selected from the group consisting of TCR beta chain sequences listed in Tables 1A-01 to 1A-05, 1B-01 to 1B-04, 1C-01 to 1C-03, 1D-01 to 1D-03, 1E-01 to 1E-02, and 1F-01 to 1F-03, wherein the binding protein is capable of binding to a SARS-CoV-2 immunodominant peptide-MHC (pMHC) complex, optionally wherein the binding affinity has a K_{d} less than or equal to about 5×10⁻⁴ M.

7. The binding protein of any one of claims 1-6, wherein 1) the TCR alpha chain CDR, TCR V_{α} domain, and/or TCR alpha chain is encoded by a TRAV, TRAJ, and/or TRAC gene or fragment thereof selected from the group of TRAV, TRAJ, and TRAC genes listed in Tables 1A-01 to 1A-05, 1B-01 to 1B-04, 1C-01 to 1C-03, 1D-01 to 1D-03, 1E-01 to 1E-02, and 1F-01 to 1F-03, and/or 2) the TCR beta chain CDR, TCR V_{β} domain, and/or TCR beta chain is encoded by a TRBV, TRBJ, and/or TRBC gene or fragment thereof selected from the group of TRBV, TRBJ, and TRBC genes listed in Tables 1A-01 to 1A-05, 1B-01 to 1B-04, 1C-01 to 1C-03, 1D-01 to 1D-03, 1E-01 to 1E-02, and 1F-01 to 1F-03, and/or 3) each CDR of the binding protein has up to five amino acid substitutions, insertions, deletions, or a combination thereof as compared to the cognate reference CDR sequence listed in Tables 1A-01 to 1A-05, 1B-01 to 1B-04, 1C-01 to 1C-03, 1D-01 to 1D-03, 1E-01 to 1E-02, and 1F-01 to 1F-03.

8. The binding protein of any one of claims 1-7, wherein the SARS-CoV-2 immunodominant peptide is selected from the group consisting of the sequence listed in Table 2.

9. The binding protein of any one of claims 1-8, wherein the binding protein is chimeric, humanized, or human.

10. The binding protein of any one of claims 1-9, wherein the binding protein is a TCR, an antigen-binding fragment of a TCR, a single chain TCR (scTCR), a chimeric antigen receptor (CAR), or a fusion protein comprising a TCR and an effector domain, optionally wherein the binding domain comprises a transmembrane domain and an effector domain that is intracellular.

11. The binding protein of any one of claims 1-10, wherein the TCR alpha chain and the TCR beta chain are covalently linked, optionally wherein the TCR alpha chain and the TCR beta chain are covalently linked through a linker peptide.

12. The binding protein of any one of claims 1-11, wherein the TCR alpha chain and/or the TCR beta chain are covalently linked to a moiety, optionally wherein the covalently linked moiety comprises an affinity tag or a label.

13. The binding protein of claim 12, wherein the affinity tag is selected from the group consisting of Glutathione-S-Transferase (GST), calmodulin binding protein (CBP), protein C tag, Myc tag, HaloTag, HA tag, Flag tag, His tag, biotin tag, and V5 tag, and/or wherein the label is a fluorescent protein.

14. The binding protein of any one of claims 1-13, wherein the covalently linked moiety is selected from the group consisting of an inflammatory agent, cytokine, toxin, cytotoxic molecule, radioactive isotope, or antibody or antigen-binding fragment thereof.

15. The binding protein of any one of claims 1-14, wherein the binding protein binds to the pMHC complex on a cell surface.

16. The binding protein of any one of claims 1-15, wherein the MHC is a MHC multimer, optionally wherein the MHC multimer is a tetramer.

17. The binding protein of any one of claims 1-16, wherein the MHC is a MHC class I molecule.

18. The binding protein of any one of claims 1-17, wherein the MHC comprises an MHC alpha chain that is an HLA serotype selected from the group consisting of HLA-A*02, HLA-A*03, HLA-A*01, HLA-A*11, HLA-A*24, and/or HLA-B*07.

19. The binding protein of any one of claims 1-18, wherein the HLA allele is selected from the group consisting of HLA-A*0201, HLA-A*0202, HLA-A*0203, HLA-A*0204, HLA-A*0205, HLA-A*0206, HLA-A*0207, HLA-A*0210, HLA-A*0211, HLA-A*0212, HLA-A*0213, HLA-A*0214, HLA-A*0216, HLA-A*0217, HLA-A*0219, HLA-A*0220, HLA-A*0222, HLA-A*0224, HLA-A*0230, HLA-A*0242, HLA-A*0253, HLA-A*0260, and HLA-A*0274 allele.

20. The binding protein of any one of claims 1-19, wherein binding of the binding protein to the peptide-MHC (pMHC) complex elicits an immune response, optionally wherein the immune response is a T cell response.

21. The binding protein of any one of claims 1-20, wherein the T cell response is selected from the group consisting of T cell expansion, cytokine release, and/or cytotoxic killing and/or wherein the binding protein is capable of specifically binding to the SARS-CoV-2 immunodominant peptide-MHC (pMHC) complex with a K_{d} less than or equal to about 5×10⁻⁴ M, less than or equal to about 1×10⁻⁴ M, less than or equal to about 5×10⁻⁵ M, less than or equal to about 1×10⁻⁵ M, less than or equal to about 5×10⁻⁶ M, less than or equal to about 1×10⁻⁶ M, less than or equal to about 5×10⁻⁷ M, less than or equal to about 1×10⁻⁷ M, less than or equal to about 5×10⁻⁸ M, less than or equal to about 1×10⁻⁸ M, less than or equal to about 5×10⁻⁹ M, less than or equal to about 1×10⁻⁹ M, less than or equal to about 5×10⁻¹⁰ M, less than or equal to about 1×10⁻¹⁰ M, less than or equal to about 5×10⁻¹¹ M, less than or equal to about 1×10⁻¹¹ M, less than or equal to about 5×10⁻¹² M, or less than or equal to about 1×10⁻¹² M.

22. A TCR alpha chain and/or beta chain selected from the group consisting of TCR alpha chain and beta chain sequences listed in Tables 1A-01 to 1A-05, 1B-01 to 1B-04, 1C-01 to 1C-03, 1D-01 to 1D-03, 1E-01 to 1E-02, and 1F-01 to 1F-03.

23. An isolated nucleic acid molecule that hybridizes, under stringent conditions, with the complement of a nucleic acid encoding a polypeptide selected from the group consisting of polypeptide sequences listed in Tables 1A-01 to 1A-05, 1B-01 to 1B-04, 1C-01 to 1C-03, 1D-01 to 1D-03, 1E-01 to 1E-02, and 1F-01 to 1F-03, or a sequence with at least about 80% homology to a nucleic acid encoding a polypeptide selected from the group consisting of the polypeptide sequences listed in Tables 1A-01 to 1A-05, 1B-01 to 1B-04, 1C-01 to 1C-03, 1D-01 to 1D-03, 1E-01 to 1E-02, and 1F-01 to 1F-03, optionally wherein the isolated nucleic acid molecule comprises 1) a TRAV, TRAJ, and/or TRAC gene or fragment thereof selected from the group of TRAV, TRAJ, and TRAC genes listed in Tables 1A-01 to 1A-05, 1B-01 to 1B-04, 1C-01 to 1C-03, 1D-01 to 1D-03, 1E-01 to 1E-02, and 1F-01 to 1F-03 and/or 2) a TRBV, TRBJ, and/or TRBC gene or fragment thereof selected from the group of TRBV, TRBJ, and TRBC genes listed in Tables 1A-01 to 1A-05, 1B-01 to 1B-04, 1C-01 to 1C-03, 1D-01 to 1D-03, 1E-01 to 1E-02, and 1F-01 to 1F-03.

24. The isolated nucleic acid of claim of claim 23, wherein the nucleic acid is codon optimized for expression in a host cell.

25. A vector comprising the isolated nucleic acid of claim 23 or 24.

26. The vector of claim 25, wherein the vector is a cloning vector, expression vector, or viral vector.

27. A host cell which comprises the isolated nucleic acid of claim 23 or 24, comprises the vector of claim 25 or 26, and/or expresses the binding protein of any one of claims 1-21, optionally wherein the cell is genetically engineered.

28. The host cell of claim 27, wherein the host cell comprises a chromosomal gene knockout of a TCR gene, an HLA gene, or both.

29. The host cell of claim 27 or 28, wherein the host cell comprises a knockout of an HLA gene selected from an α1 macroglobulin gene, α2 macroglobulin gene, α3 macroglobulin gene, β1 microglobulin gene, β2 microglobulin gene, and combinations thereof.

30. The host cell of any one of claims 27-29, wherein the host cell comprises a knockout of a TCR gene selected from a TCR α variable region gene, TCR β variable region gene, TCR constant region gene, and combinations thereof.

31. The host cell of any one of claims 27-30, wherein the host cell is a hematopoietic progenitor cell, peripheral blood mononuclear cell (PBMC), cord blood cell, or immune cell.

32. The host cell of any one of claims 27-31, wherein the immune cell is a cytotoxic lymphocyte, cytotoxic lymphocyte precursor cell, cytotoxic lymphocyte progenitor cell, cytotoxic lymphocyte stem cell, CD4⁺ T cell, CD8⁺ T cell, CD4/CD8 double negative T cell, gamma delta (γδ) T cell, natural killer (NK) cell, NK-T cell, dendritic cell, or combination thereof.

33. The host cell of any one of claims 27-32, wherein the T cell is a naive T cell, central memory T cell, effector memory T cell, or a combination thereof.

34. The host cell of any one of claims 27-33, wherein the T cell is a primary T cell or a cell of a T cell line.

35. The host cell of any one of claims 27-34, wherein the T cell does not express or has a lower surface expression of an endogenous TCR

36. The host cell of any one of claims 27-35, wherein the host cell is capable of producing a cytokine or a cytotoxic molecule when contacted with a target cell that comprises a peptide-MHC (pMHC) complex comprising a peptide epitope selected from Table 2 in the context of an MHC molecule.

37. The host cell of claim 36, wherein the host cell is contacted with the target cell in vitro or in vivo.

38. The host cell of claim 36 or 37, wherein the cytokine is TNF-α and/or IFN-γ.

39. The host cell of any one of claims 36-38, wherein the cytotoxic molecule is perforins and/or granzymes.

40. The host cell of any one of claims 36-39, wherein the host cell is capable of killing a target cell that comprises a peptide-MHC (pMHC) complex comprising a peptide epitope selected from Table 2 in the context of an MHC molecule.

41. The host cell of any one of claims 36-40, wherein the MHC molecule is a MHC class I molecule.

42. The host cell of any one of claims 36-41, wherein the MHC molecule comprises an MHC alpha chain that is an HLA serotype selected from the group consisting of HLA-A*02, HLA-A*03, HLA-A*01, HLA-A*11, HLA-A*24, and/or HLA-B*07.

43. The host cell of any one of claims 36-42, wherein the HLA allele is selected from the group consisting of HLA-A*02:01.

44. The host cell of any one of claims 36-43, wherein the target cell is a SARS-CoV-2-infected cell.

45. A population of host cells of any one of claims 27-44.

46. A composition comprising: a) a binding protein according to any one of claims 1-21, b) an isolated nucleic acid according to claim 23 or 24, c) a vector according to claim 25 or 26, d) a host cell according to any one of claims 27-44, and/or e) a population of host cells according to claim 45, and a carrier.

47. A device or kit comprising: a) a binding protein according to any one of claims 1-21, b) an isolated nucleic acid according to claim 23 or 24, c) a vector according to claim 25 or 26, d) a host cell according to any one of claims 27-44, and/or e) a population of host cells according to claim 45, said device or kit optionally comprising a reagent to detect binding of a), d) and/or e) to a pMHC complex.

48. A method of producing a binding protein according to any one of claims 1-21, wherein the method comprises the steps of: (i) culturing a transformed host cell which has been transformed by a nucleic acid comprising a sequence encoding a binding protein according to any one of claims 1-21 under conditions suitable to allow expression of said binding protein; and (ii) recovering the expressed binding protein.

49. A method of producing a host cell expressing a binding protein according to any one of claims 1-21, wherein the method comprises the steps of: (i) introducing a nucleic acid comprising a sequence encoding a binding protein according to any one of claims 1-21 into the host cell; (ii) culturing the transformed host cell under conditions suitable to allow expression of said binding protein.

50. A method of detecting the presence or absence of a SARS-CoV-2 antigen comprising a peptide epitope selected from Table 2 and/or SARS-CoV-2 infection, comprising detecting the presence or absence of said SARS-CoV-2 antigen in a sample by use of at least one binding protein according to any one of claims 1-21, or at least one host cell according to claims 27-44, wherein detection of the SARS-CoV-2 antigen is indicative of the presence of a SARS-CoV-2 antigen and/or SARS-CoV-2 infection.

51. The method of claim 50, wherein the at least one binding protein, or the at least one host cell, forms a complex with a peptide epitope selected from Table 2 in the context of an MHC molecule, and the complex is detected in the form of fluorescence activated cell sorting (FACS), enzyme linked immunosorbent assay (ELISA), radioimmune assay (RIA), immunochemically, Western blot, or intracellular flow assay.

52. The method of claim 50 or 51, further comprising obtaining the sample from a subject.

53. The method of any one of claims 50-52, further comprising confirming SARS-CoV-2 infection by detecting SARS-CoV-2 RNA.

54. A method of detecting the level of SARS-CoV-2 infection in a subject, comprising:
a) contacting a sample obtained from the subject with at least one binding protein according to any one of claims 1-21, at least one host cell according to claims 27-44, or a population of host cells according to claim 45; and
b) detecting the level of reactivity,
wherein a higher level of reactivity compared to a control level indicates the level of SARS-CoV-2 infection in the subject.

55. The method of claim 54, wherein the control level is a reference number.

56. The method of claim 54, wherein the control level is a level of a subject without exposure to SARS-CoV-2.

57. A method for monitoring the progression of COVID-19 in a subject, the method comprising:
a) detecting in a subject sample at a first point in time the level of a SARS-CoV-2 antigen or SARS-CoV-2 infection, according to any one of claims 50-56;
b) repeating step a) at a subsequent point in time; and
c) comparing the level of a SARS-CoV-2 antigen or SARS-CoV-2 infection detected in steps a) and b) to monitor the progression of COVID-19 in the subject, wherein a reduced level of SARS-CoV-2 antigen or infection detected in step b) compared to step a) indicates an improved progression of COVID-19 in the subject.

58. The method of claim 57, wherein between the first point in time and the subsequent point in time, the subject has undergone treatment to treat COVID-19.

59. A method for predicting the clinical outcome of a subject afflicted with SARS-CoV-2 infection comprising:
a) determining the presence or level of reactivity between a sample obtained from the subject and at least one binding protein according to any one of claims 1-21, at least one host cell according to claims 27-44, or a population of host cells according to claim 45; and
b) comparing the presence or level of reactivity to that from a control, wherein the control is obtained from a subject having a good clinical outcome;
wherein the presence or a higher level of reactivity in the subject sample as compared to the control indicates that the subject has a good clinical outcome.

60. A method of assessing the efficacy of a SARS-CoV-2 therapy comprising:
a) determining the presence or level of reactivity between a sample obtained from the subject and at least one binding protein according to any one of claims 1-21, at least one host cell according to claims 27-44, or a population of host cells according to claim 45, in a first sample obtained from the subject prior to providing at least a portion of the SARS-CoV-2 therapy to the subject, and
b) determining the presence or level of reactivity between a sample obtained from the subject and at least one binding protein according to any one of claims 1-21, at least one host cell according to claims 27-44, or a population of host cells according to claim 45, in a second sample obtained from the subject following provision of the portion of the SARS-CoV-2 therapy,
wherein the presence or a higher level of reactivity in the second sample, relative to the first sample, is an indication that the therapy is efficacious for treating SARS-CoV-2 in the subject.

61. The method of any one of claims 54-60, wherein the level of reactivity is indicated by a) the presence of binding and/or b) T cell activation and/or effector function, optionally wherein the T cell activation or effector function is T cell proliferation, killing, or cytokine release.

62. The method of any one of claims 54-61, wherein the T cell binding, activation, and/or effector function is detected using fluorescence activated cell sorting (FACS), enzyme linked immunosorbent assay (ELISA), radioimmune assay (RIA),
immunochemically, Western blot, or intracellular flow assay.

63. A method of preventing and/or treating SARS-CoV-2 infection in a subject comprising administering to the subject a therapeutically effective amount of a composition comprising cells expressing at least one binding protein of any one of claims 1-21.

64. The method of claim 63, wherein the cell is an allogeneic cell, syngeneic cell, or autologous cell.

65. The method of claim 63 or 64, wherein the cell is genetically modified.

66. The method of any one of claims 63-65, wherein the cell comprises a chromosomal gene knockout of a TCR gene, an HLA gene, or both a TCR gene and an HLA gene.

67. The method of any one of claims 63-66, wherein the cell comprises a knockout of an HLA gene selected from an α1 macroglobulin gene, α2 macroglobulin gene, α3 macroglobulin gene, β1 microglobulin gene, β2 microglobulin gene, and a combination thereof.

68. The method of any one of claims 63-67, wherein the cell comprises a knockout of a TCR gene selected from a TCR α variable region gene, TCR β variable region gene, TCR constant region gene, and combinations thereof.

69. The method of any one of claims 63-68, wherein the cell is a hematopoietic progenitor cell, peripheral blood mononuclear cell (PBMC), cord blood cell, or immune cell.

70. The method of any one of claims 63-69, wherein the immune cell is a cytotoxic lymphocyte, cytotoxic lymphocyte precursor cell, cytotoxic lymphocyte progenitor cell, cytotoxic lymphocyte stem cell, CD4⁺ T cell, CD8⁺ T cell, CD4/CD8 double negative T cell, gamma delta (γγ) T cell, natural killer (NK) cell, NK-T cell, dendritic cell, or combination thereof.

71. The method of any one of claims 63-70, wherein the T cell is a naive T cell, central memory T cell, effector memory T cell, or combination thereof.

72. The method of any one of claims 63-71, wherein the T cell is a primary T cell or a cell of a T cell line.

73. The method of any one of claims 63-72, wherein the T cell does not express or has a lower surface expression of an endogenous TCR.

74. The method of any one of claims 63-73, wherein the cell is capable of producing a cytokine or a cytotoxic molecule when contacted with a target cell that comprises a peptide-MHC (pMHC) complex comprising a peptide epitope selected from Table 2 in the context of an MHC molecule.

75. The method of any one of claims 63-74, wherein the cytokine is TNF-α and/or IFN-γ.

76. The method of any one of claims 63-75, wherein the cytotoxic molecule is perforins and/or granzymes.

77. The method of any one of claims 63-76, wherein the host cell is capable of killing a target cell that comprises a peptide-MHC (pMHC) complex comprising a peptide epitope selected from Table 2 in the context of an MHC molecule.

78. The method of any one of claims 63-77, wherein the MHC molecule is an MHC class I molecule.

79. The method of any one of claims 63-78, wherein the MHC molecule comprises an MHC alpha chain that is an HLA serotype selected from the group consisting of HLA-A*02, HLA-A*03, HLA-A*01, HLA-A*11, HLA-A*24, and/or HLA-B*07.

80. The method of any one of claims 63-79, wherein the HLA allele is selected from the group consisting of HLA-A*02:01.

81. The method of any one of claims 63-80, wherein the target cell is a SARS-CoV-2-infected cell in the subject.

82. The method of any one of claims 63-81, wherein the composition further comprises a pharmaceutically acceptable carrier.

83. The method of any one of claims 63-82, wherein the composition induces an immune response against the SARS-CoV-2 in the subject.

84. The method of any one of claims 63-83, wherein the composition induces an antigen-specific T cell immune response against the SARS-CoV-2 in the subject.

85. The method of any one of claims 63-84, wherein the antigen-specific T cell immune response comprises at least one of a CD4⁺ helper T lymphocyte (Th) response and a CD8+ cytotoxic T lymphocyte (CTL) response.

86. The method of any one of claims 63-85, wherein the CTL response is directed against a SARS-CoV-2-infected cell.

87. The method of any one of claims 63-86, further comprising administering at least one additional COVID-19 treatment to the subject.

88. The method of any one of claims 63-87, wherein the at least one additional COVID-19 treatment is administered concurrently or sequentially with the composition.

89. The method of any one of claims 52-88, wherein the subject is a mammal, optionally wherein the mammal is a human, a primate, or a rodent.

The application's sequence listing, which the Patent Office published only in electronic form, follows.

SEQUENCE LISTING (1267 sequences)

SEQ ID NO: 1 - protein, 9 aa, Severe acute respiratory syndrome coronavirus 2
KLWAQCVQL

SEQ ID NO: 2 - protein, 10 aa, Severe acute respiratory syndrome coronavirus 2
KTFPPTEPKK

SEQ ID NO: 3 - protein, 9 aa, Severe acute respiratory syndrome coronavirus 2
ALWEIQQVV

SEQ ID NO: 4 - protein, 275 aa, Homo sapiens
MSLSSLLKVVTASLWLGPGIAQKITQTQPGMFVQEKEAVTLDCTYDTSDPSYGLFWYKQPSSGEMIFLIYQGSYDQQNATEGRYSLNFQKARKSANLVISASQLGDSAMYFCAMREGGGNNRLAFGKGNQVVVIPNIQNPDPAVYQLRDSKSSDKSVCLFTDFDSQTNVSQSKDSDVYITDKTVLDMRSMDFKSNSAVAWSNKSDFACANAFNNSIIPEDTFFPSPESSCDVKLVEKSFETDTNLNFQNLSVIGFRILLLKVAGFNLLMTLRLWS

SEQ ID NO: 5 - protein, 312 aa, Homo sapiens
MGTSLLCWMALCLLGADHADTGVSQNPRHKITKRGQNVTFRCDPISEHNRLYWYRQTLGQGPEFLTYFQNEAQLEKSRLLSDRFSAERPKGSFSTLEIQRTEQGDSAMYLCASSLEGWPDTQYFGPGTRLTVLEDLKNVFPPEVAVFEPSEAEISHTQKATLVCLATGFYPDHVELSWWVNGKEVHSGVSTDPQPLKEQPALNDSRYCLSSRLRVSATFWQNPRNHFRCQVQFYGLSENDEWTQDRAKPVTQIVSAEAWGRADCGFTSESYQQGVLSATILYEILLGKATLYAVLVSALVLMAMVKRKDSRG

SEQ ID NO: 6 - protein, 273 aa, Homo sapiens
MSLSSLLKVVTASLWLGPGIAQKITQTQPGMFVQEKEAVTLDCTYDTSDPSYGLFWYKQPSSGEMIFLIYQGSYDQQNATEGRYSLNFQKARKSANLVISASQLGDSAMYFCAIYQAGTALIFGKGTTLSVSSNIQNPDPAVYQLRDSKSSDKSVCLFTDFDSQTNVSQSKDSDVYITDKTVLDMRSMDFKSNSAVAWSNKSDFACANAFNNSIIPEDTFFPSPESSCDVKLVEKSFETDTNLNFQNLSVIGFRILLLKVAGFNLLMTLRLWS

SEQ ID NO: 7 - protein, 312 aa, Homo sapiens
MGCRLLCCAVLCLLGAVPMETGVTQTPRHLVMGMTNKKSLKCEQHLGHNAMYWYKQSAKKPLELMFVYNFKEQTENNSVPSRFSPECPNSSHLFLHLHTLQPEDSALYLCASSQGLVSYNEQFFGPGTRLTVLEDLKNVFPPEVAVFEPSEAEISHTQKATLVCLATGFYPDHVELSWWVNGKEVHSGVSTDPQPLKEQPALNDSRYCLSSRLRVSATFWQNPRNHFRCQVQFYGLSENDEWTQDRAKPVTQIVSAEAWGRADCGFTSESYQQGVLSATILYEILLGKATLYAVLVSALVLMAMVKRKDSRG

SEQ ID NO: 8 - protein, 272 aa, Homo sapiens
MKRILGALLGLLSAQVCCVRGIQVEQSPPDLILQEGANSTLRCNFSDSVNNLQWFHQNPWGQLINLFYIPSGTKQNGRLSATTVATERYSLLYISSSQTTDSGVYFCAVSGVPSNTGNQFYFGTGTSLTVIPNIQNPDPAVYQLRDSKSSDKSVCLFTDFDSQTNVSQSKDSDVYITDKTVLDMRSMDFKSNSAVAWSNKSDFACANAFNNSIIPEDTFFPSPESSCDVKLVEKSFETDTNLNFQNLSVIGFRILLLKVAGFNLLMTLRLWS

SEQ ID NO: 9 - protein, 309 aa, Homo sapiens
MDTRVLCCAVICLLGAGLSNAGVMQNPRHLVRRRGQEARLRCSPMKGHSHVYWYRQLPEEGLKFMVYLQKENIIDESGMPKERFSAEFPKEGPSILRIQQVVRGDSAAYFCASSLQGAYGYTFGSGTRLTVVEDLNKVFPPEVAVFEPSEAEISHTQKATLVCLATGFFPDHVELSWWVNGKEVHSGVSTDPQPLKEQPALNDSRYCLSSRLRVSATFWQNPRNHFRCQVQFYGLSENDEWTQDRAKPVTQIVSAEAWGRADCGFTSVSYQQGVLSATILYEILLGKATLYAVLVSALVLMAMVKRKDF

SEQ ID NO: 10 - protein, 264 aa, Homo sapiens
MISLRVLLVILWLQLSWVWSQRKEVEQDPGPFNVPEGATVAFNCTYSNSASQSFFWYRQDCRKEPKLLMSVYSSGNEDGRFTAQLNRASQYISLLIRDSKLSDSATYLCQNFVFGPGTRLSVLPYIQNPDPAVYQLRDSKSSDKSVCLFTDFDSQTNVSQSKDSDVYITDKTVLDMRSMDFKSNSAVAWSNKSDFACANAFNNSIIPEDTFFPSPESSCDVKLVEKSFETDTNLNFQNLSVIGFRILLLKVAGFNLLMTLRLWS

SEQ ID NO: 11 - protein, 311 aa, Homo sapiens
MSIGLLCCVAFSLLWASPVNAGVTQTPKFQVLKTGQSMTLQCAQDMNHNSMYWYRQDPGMGLRLIYYSASEGTTDKGEVPNGYNVSRLNKREFSLRLESAAPSQTSVYFCASSGGSIFAEQYFGPGTRLTVTEDLKNVFPPEVAVFEPSEAEISHTQKATLVCLATGFYPDHVELSWWVNGKEVHSGVSTDPQPLKEQPALNDSRYCLSSRLRVSATFWQNPRNHFRCQVQFYGLSENDEWTQDRAKPVTQIVSAEAWGRADCGFTSESYQQGVLSATILYEILLGKATLYAVLVSALVLMAMVKRKDSRG

SEQ ID NO: 12 - protein, 271 aa, Homo sapiens
MASAPISMLAMLFTLSGLRAQSVAQPEDQVNVAEGNPLTVKCTYSVSGNPYLFWYVQYPNRGLQFLLKYITGDNLVKGSYGFEAEFNKSQTSFHLKKPSALVSDSALYFCAVGHAGNMLTFGGGTRLMVKPHIQNPDPAVYQLRDSKSSDKSVCLFTDFDSQTNVSQSKDSDVYITDKTVLDMRSMDFKSNSAVAWSNKSDFACANAFNNSIIPEDTFFPSPESSCDVKLVEKSFETDTNLNFQNLSVIGFRILLLKVAGFNLLMTLRLWS

SEQ ID NO: 13 - protein, 309 aa, Homo sapiens
MSLGLLCCGAFSLLWAGPVNAGVTQTPKFRVLKTGQSMTLLCAQDMNHEYMYWYRQDPGMGLRLIHYSVGEGTTAKGEVPDGYNVSRLKKQNFLLGLESAAPSQTSVYFCASSYSLETQYFGPGTRLLVLEDLKNVFPPEVAVFEPSEAEISHTQKATLVCLATGFYPDHVELSWWVNGKEVHSGVSTDPQPLKEQPALNDSRYCLSSRLRVSATFWQNPRNHFRCQVQFYGLSENDEWTQDRAKPVTQIVSAEAWGRADCGFTSESYQQGVLSATILYEILLGKATLYAVLVSALVLMAMVKRKDSRG

SEQ ID NO: 14 - protein, 272 aa, Homo sapiens
METLLGVSLVILWLQLARVNSQQGEEDPQALSIQEGENATMNCSYKTSINNLQWYRQNSGRGLVHLILIRSNEREKHSGRLRVTLDTSKKSSSLLITASRAADTASYFCATAPNQAGTALIFGKGTTLSVSSNIQNPDPAVYQLRDSKSSDKSVCLFTDFDSQTNVSQSKDSDVYITDKTVLDMRSMDFKSNSAVAWSNKSDFACANAFNNSIIPEDTFFPSPESSCDVKLVEKSFETDTNLNFQNLSVIGFRILLLKVAGFNLLMTLRLWS

SEQ ID NO: 15 - protein, 311 aa, Homo sapiens
MSISLLCCAAFPLLWAGPVNAGVTQTPKFRILKIGQSMTLQCTQDMNHNYMYWYRQDPGMGLKLIYYSVGAGITDKGEVPNGYNVSRSTTEDFPLRLELAAPSQTSVYFCASSYTGQGAAYGYTFGSGTRLTVVEDLNKVFPPEVAVFEPSEAEISHTQKATLVCLATGFFPDHVELSWWVNGKEVHSGVSTDPQPLKEQPALNDSRYCLSSRLRVSATFWQNPRNHFRCQVQFYGLSENDEWTQDRAKPVTQIVSAEAWGRADCGFTSVSYQQGVLSATILYEILLGKATLYAVLVSALVLMAMVKRKDF

SEQ ID NO: 16 - protein, 272 aa, Homo sapiens
MMKSLRVLLVILWLQLSWVWSQQKEVEQDPGPLSVPEGAIVSLNCTYSNSAFQYFMWYRQYSRKGPELLMYTYSSGNKEDGRFTAQVDKSSKYISLFIRDSQPSDSATYLCVIGGSQGNLIFGKGTKLSVKPNIQNPDPAVYQLRDSKSSDKSVCLFTDFDSQTNVSQSKDSDVYITDKTVLDMRSMDFKSNSAVAWSNKSDFACANAFNNSIIPEDTFFPSPESSCDVKLVEKSFETDTNLNFQNLSVIGFRILLLKVAGFNLLMTLRLWS

SEQ ID NO: 17 - protein, 309 aa, Homo sapiens
MSNQVLCCVVLCFLGANTVDGGITQSPKYLFRKEGQNVTLSCEQNLNHDAMYWYRQDPGQGLRLIYYSQIVNDFQKGDIAEGYSVSREKKESFPLTVTSAQKNPTAFYLCASSIVAHEQFFGPGTRLTVLEDLKNVFPPEVAVFEPSEAEISHTQKATLVCLATGFYPDHVELSWWVNGKEVHSGVSTDPQPLKEQPALNDSRYCLSSRLRVSATFWQNPRNHFRCQVQFYGLSENDEWTQDRAKPVTQIVSAEAWGRADCGFTSESYQQGVLSATILYEILLGKATLYAVLVSALVLMAMVKRKDSRG

SEQ ID NO: 18 - protein, 267 aa, Homo sapiens
MRLVARVTVFLTFGTIIDAKTTQPPSMDCAEGRAANLPCNHSTISGNEYVYWYRQIHSQGPQYIIHGLKNNETNEMASLIITEDRKSSTLILPHATLRDTAVYYCIVRRNYGQNFVFGPGTRLSVLPYIQNPDPAVYQLRDSKSSDKSVCLFTDFDSQTNVSQSKDSDVYITDKTVLDMRSMDFKSNSAVAWSNKSDFACANAFNNSIIPEDTFFPSPESSCDVKLVEKSFETDTNLNFQNLSVIGFRILLLKVAGFNLLMTLRLWS

SEQ ID NO: 19 - protein, 312 aa, Homo sapiens
MSNQVLCCVVLCFLGANTVDGGITQSPKYLFRKEGQNVTLSCEQNLNHDAMYWYRQDPGQGLRLIYYSQIVNDFQKGDIAEGYSVSREKKESFPLTVTSAQKNPTAFYLCASSMDGRAQETQYFGPGTRLLVLEDLKNVFPPEVAVFEPSEAEISHTQKATLVCLATGFYPDHVELSWWVNGKEVHSGVSTDPQPLKEQPALNDSRYCLSSRLRVSATFWQNPRNHFRCQVQFYGLSENDEWTQDRAKPVTQIVSAEAWGRADCGFTSESYQQGVLSATILYEILLGKATLYAVLVSALVLMAMVKRKDSRG

SEQ ID NO: 20 - protein, 269 aa, Homo sapiens
MWGAFLLYVSMKMGGTAGQSLEQPSEVTAVEGAIVQINCTYQTSGFYGLSWYQQHDGGAPTFLSYNALDGLEETGRFSSFLSRSDSYGYLLLQELQMKDSASYFCAVPDRGSTLGRLYFGRGTQLTVWPDIQNPDPAVYQLRDSKSSDKSVCLFTDFDSQTNVSQSKDSDVYITDKTVLDMRSMDFKSNSAVAWSNKSDFACANAFNNSIIPEDTFFPSPESSCDVKLVEKSFETDTNLNFQNLSVIGFRILLLKVAGFNLLMTLRLWS

SEQ ID NO: 21 - protein, 310 aa, Homo sapiens
MDTWLVCWAIFSLLKAGLTEPEVTQTPSHQVTQMGQEVILRCVPISNHLYFYWYRQILGQKVEFLVSFYNNEISEKSEIFDDQFSVERPDGSNFTLKIRSTKLEDSAMYFCASTDRDNEQFFGPGTRLTVLEDLKNVFPPEVAVFEPSEAEISHTQKATLVCLATGFYPDHVELSWWVNGKEVHSGVSTDPQPLKEQPALNDSRYCLSSRLRVSATFWQNPRNHFRCQVQFYGLSENDEWTQDRAKPVTQIVSAEAWGRADCGFTSESYQQGVLSATILYEILLGKATLYAVLVSALVLMAMVKRKDSRG

SEQ ID NO: 22 - protein, 271 aa, Homo sapiens
MASAPISMLAMLFTLSGLRAQSVAQPEDQVNVAEGNPLTVKCTYSVSGNPYLFWYVQYPNRGLQFLLKYITGDNLVKGSYGFEAEFNKSQTSFHLKKPSALVSDSALYFCAELRAGNMLTFGGGTRLMVKPHIQNPDPAVYQLRDSKSSDKSVCLFTDFDSQTNVSQSKDSDVYITDKTVLDMRSMDFKSNSAVAWSNKSDFACANAFNNSIIPEDTFFPSPESSCDVKLVEKSFETDTNLNFQNLSVIGFRILLLKVAGFNLLMTLRLWS

SEQ ID NO: 23 - protein, 308 aa, Homo sapiens
MSLGLLCCGAFSLLWAGPVNAGVTQTPKFRVLKTGQSMTLLCAQDMNHEYMYWYRQDPGMGLRLIHYSVGEGTTAKGEVPDGYNVSRLKKQNFLLGLESAAPSQTSVYFCASSPHYEQYFGPGTRLTVTEDLKNVFPPEVAVFEPSEAEISHTQKATLVCLATGFYPDHVELSWWVNGKEVHSGVSTDPQPLKEQPALNDSRYCLSSRLRVSATFWQNPRNHFRCQVQFYGLSENDEWTQDRAKPVTQIVSAEAWGRADCGFTSESYQQGVLSATILYEILLGKATLYAVLVSALVLMAMVKRKDSRG

SEQ ID NO: 24 - protein, 268 aa, Homo sapiens
MMKSLRVLLVILWLQLSWVWSQQKEVEQDPGPLSVPEGAIVSLNCTYSNSAFQYFMWYRQYSRKGPELLMYTYSSGNKEDGRFTAQVDKSSKYISLFIRDSQPSDSATYLCASNDMRFGAGTRLTVKPNIQNPDPAVYQLRDSKSSDKSVCLFTDFDSQTNVSQSKDSDVYITDKTVLDMRSMDFKSNSAVAWSNKSDFACANAFNNSIIPEDTFFPSPESSCDVKLVEKSFETDTNLNFQNLSVIGFRILLLKVAGFNLLMTLRLWS

SEQ ID NO: 25 - protein, 311 aa, Homo sapiens
MSIGLLCCVAFSLLWASPVNAGVTQTPKFQVLKTGQSMTLQCAQDMNHNSMYWYRQDPGMGLRLIYYSASEGTTDKGEVPNGYNVSRLNKREFSLRLESAAPSQTSVYFCASRITESSYEQYFGPGTRLTVTEDLKNVFPPEVAVFEPSEAEISHTQKATLVCLATGFYPDHVELSWWVNGKEVHSGVSTDPQPLKEQPALNDSRYCLSSRLRVSATFWQNPRNHFRCQVQFYGLSENDEWTQDRAKPVTQIVSAEAWGRADCGFTSESYQQGVLSATILYEILLGKATLYAVLVSALVLMAMVKRKDSRG

SEQ ID NO: 26 - protein, 277 aa, Homo sapiens
MACPGFLWALVISTCLEFSMAQTVTQSQPEMSVQEAETVTLSCTYDTSESDYYLFWYKQPPSRQMILVIRQEAYKQQNATENRFSVNFQKAAKSFSLKISDSQLGDAAMYFCAYTPPRSFGNEKLTFGTGTRLTIIPNIQNPDPAVYQLRDSKSSDKSVCLFTDFDSQTNVSQSKDSDVYITDKTVLDMRSMDFKSNSAVAWSNKSDFACANAFNNSIIPEDTFFPSPESSCDVKLVEKSFETDTNLNFQNLSVIGFRILLLKVAGFNLLMTLRLWS

SEQ ID NO: 27 - protein, 315 aa, Homo sapiens
MGFRLLCCVAFCLLGAGPVDSGVTQTPKHLITATGQRVTLRCSPRSGDLSVYWYQQSLDQGLQFLIQYYNGEERAKGNILERFSAQQFPDLHSELNLSSLELGDSALYFCASSVAAWREGRPDTQYFGPGTRLTVLEDLKNVFPPEVAVFEPSEAEISHTQKATLVCLATGFYPDHVELSWWVNGKEVHSGVSTDPQPLKEQPALNDSRYCLSSRLRVSATFWQNPRNHFRCQVQFYGLSENDEWTQDRAKPVTQIVSAEAWGRADCGFTSESYQQGVLSATILYEILLGKATLYAVLVSALVLMAMVKRKDSRG

SEQ ID NO: 28 - protein, 266 aa, Homo sapiens
MRQVARVIVFLTLSTLSLAKTTQPISMDSYEGQEVNITCSHNNIATNDYITWYQQFPSQGPRFIIQGYKTKVTNEVASLFIPADRKSSTLSLPRVSLSDTAVYYCLVGDDNARLMFGDGTQLVVKPNIQNPDPAVYQLRDSKSSDKSVCLFTDFDSQTNVSQSKDSDVYITDKTVLDMRSMDFKSNSAVAWSNKSDFACANAFNNSIIPEDTFFPSPESSCDVKLVEKSFETDTNLNFQNLSVIGFRILLLKVAGFNLLMTLRLWS

SEQ ID NO: 29 - protein, 311 aa, Homo sapiens
MSIGLLCCVAFSLLWASPVNAGVTQTPKFQVLKTGQSMTLQCAQDMNHNSMYWYRQDPGMGLRLIYYSASEGTTDKGEVPNGYNVSRLNKREFSLRLESAAPSQTSVYFCASSEWGRGLGYGYTFGSGTRLTVVEDLNKVFPPEVAVFEPSEAEISHTQKATLVCLATGFFPDHVELSWWVNGKEVHSGVSTDPQPLKEQPALNDSRYCLSSRLRVSATFWQNPRNHFRCQVQFYGLSENDEWTQDRAKPVTQIVSAEAWGRADCGFTSVSYQQGVLSATILYEILLGKATLYAVLVSALVLMAMVKRKDF

SEQ ID NO: 30 - protein, 281 aa, Homo sapiens
MAMLLGASVLILWLQPDWVNSQQKNDDQQVKQNSPSLSVQEGRISILNCDYTNSMFDYFLWYKKYPAEGPTFLISISSIKDKNEDGRFTVFLNKSAKHLSLHIVPSQPGDSAVYFCAASAEGANSGYALNFGKGTSLLVTPHIQNPDPAVYQLRDSKSSDKSVCLFTDFDSQTNVSQSKDSDVYITDKTVLDMRSMDFKSNSAVAWSNKSDFACANAFNNSIIPEDTFFPSPESSCDVKLVEKSFETDTNLNFQNLSVIGFRILLLKVAGFNLLMTLRLWS

SEQ ID NO: 31 - protein, 266 aa, Homo sapiens
MWGAFLLYVSMKMGGTAGQSLEQPSEVTAVEGAIVQINCTYQTSGFYGLSWYQQHDGGAPTFLSYNALDGLEETGRFSSFLSRSDSYGYLLLQELQMKDSASYFCAGSLDGQKLLFARGTMLKVDLNIQNPDPAVYQLRDSKSSDKSVCLFTDFDSQTNVSQSKDSDVYITDKTVLDMRSMDFKSNSAVAWSNKSDFACANAFNNSIIPEDTFFPSPESSCDVKLVEKSFETDTNLNFQNLSVIGFRILLLKVAGFNLLMTLRLWS

SEQ ID NO: 32 - protein, 312 aa, Homo sapiens
MGPQLLGYVVLCLLGAGPLEAQVTQNPRYLITVTGKKLTVTCSQNMNHEYMSWYRQDPGLGLRQIYYSMNVEVTDKGDVPEGYKVSRKEKRNFPLILESPSPNQTSLYFCASSTTSGRRETQYFGPGTRLLVLEDLKNVFPPEVAVFEPSEAEISHTQKATLVCLATGFYPDHVELSWWVNGKEVHSGVSTDPQPLKEQPALNDSRYCLSSRLRVSATFWQNPRNHFRCQVQFYGLSENDEWTQDRAKPVTQIVSAEAWGRADCGFTSESYQQGVLSATILYEILLGKATLYAVLVSALVLMAMVKRKDSRG

SEQ ID NO: 33 - protein, 282 aa, Homo sapiens
MLTASLLRAVIASICVVSSMAQKVTQAQTEISVVEKEDVTLDCVYETRDTTYYLFWYKQPPSGELVFLIRRNSFDEQNEISGRYSWNFQKSTSSFNFTITASQVVDSAVYFCALSGIGFGNVLHCFGNVLHCGSGTQVIVLPHIQNPDPAVYQLRDSKSSDKSVCLFTDFDSQTNVSQSKDSDVYITDKTVLDMRSMDFKSNSAVAWSNKSDFACANAFNNSIIPEDTFFPSPESSCDVKLVEKSFETDTNLNFQNLSVIGFRILLLKVAGFNLLMTLRLWS

SEQ ID NO: 34 - protein, 312 aa, Homo sapiens
MLCSLLALLLGTFFGVRSQTIHQWPATLVQPVGSPLSLECTVEGTSNPNLYWYRQAAGRGLQLLFYSVGIGQISSEVPQNLSASRPQDRQFILSSKKLLLSDSGFYLCAWGELPKDSGANVLTFGAGSRLTVLEDLKNVFPPEVAVFEPSEAEISHTQKATLVCLATGFYPDHVELSWWVNGKEVHSGVSTDPQPLKEQPALNDSRYCLSSRLRVSATFWQNPRNHFRCQVQFYGLSENDEWTQDRAKPVTQIVSAEAWGRADCGFTSESYQQGVLSATILYEILLGKATLYAVLVSALVLMAMVKRKDSRG

SEQ ID NO: 35 - protein, 269 aa, Homo sapiens
MISLRVLLVILWLQLSWVWSQRKEVEQDPGPFNVPEGATVAFNCTYSNSASQSFFWYRQDCRKEPKLLMSVYSSGNEDGRFTAQLNRASQYISLLIRDSKLSDSATYLCVVRSGYALNFGKGTSLLVTPHIQNPDPAVYQLRDSKSSDKSVCLFTDFDSQTNVSQSKDSDVYITDKTVLDMRSMDFKSNSAVAWSNKSDFACANAFNNSIIPEDTFFPSPESSCDVKLVEKSFETDTNLNFQNLSVIGFRILLLKVAGFNLLMTLRLWS

SEQ ID NO: 36 - protein, 313 aa, Homo sapiens
MGIRLLCRVAFCFLAVGLVDVKVTQSSRYLVKRTGEKVFLECVQDMDHENMFWYRQDPGLGLRLIYFSYDVKMKEKGDIPEGYSVSREKKERFSLILESASTNQTSMYLCASSSPNADRSYEQYFGPGTRLTVTEDLKNVFPPEVAVFEPSEAEISHTQKATLVCLATGFYPDHVELSWWVNGKEVHSGVSTDPQPLKEQPALNDSRYCLSSRLRVSATFWQNPRNHFRCQVQFYGLSENDEWTQDRAKPVTQIVSAEAWGRADCGFTSESYQQGVLSATILYEILLGKATLYAVLVSALVLMAMVKRKDSRG

SEQ ID NO: 37 - protein, 267 aa, Homo sapiens
MKSLRVLLVILWLQLSWVWSQQKEVEQNSGPLSVPEGAIASLNCTYSDRGSQSFFWYRQYSGKSPELIMFIYSNGDKEDGRFTAQLNKASQYVSLLIRDSQPSDSATYLCAVKDMRFGAGTRLTVKPNIQNPDPAVYQLRDSKSSDKSVCLFTDFDSQTNVSQSKDSDVYITDKTVLDMRSMDFKSNSAVAWSNKSDFACANAFNNSIIPEDTFFPSPESSCDVKLVEKSFETDTNLNFQNLSVIGFRILLLKVAGFNLLMTLRLWS

SEQ ID NO: 38 - protein, 320 aa, Homo sapiens
MLLLLLLLGPGISLLLPGSLAGSGLGAVVSQHPSWVICKSGTSVKIECRSLDFQATTMFWYRQFPKQSLMLMATSNEGSKATYEQGVEKDKFLINHASLTLSTLTVTSAHPEDSSFYICSASPGTGFSGNTIYFGEGSWLTVVEDLNKVFPPEVAVFEPSEAEISHTQKATLVCLATGFFPDHVELSWWVNGKEVHSGVSTDPQPLKEQPALNDSRYCLSSRLRVSATFWQNPRNHFRCQVQFYGLSENDEWTQDRAKPVTQIVSAEAWGRADCGFTSVSYQQGVLSATILYEILLGKATLYAVLVSALVLMAMVKRKDF

SEQ ID NO: 39 - protein, 274 aa, Homo sapiens
MKSLRVLLVILWLQLSWVWSQQKEVEQNSGPLSVPEGAIASLNCTYSDRGSQSFFWYRQYSGKSPELIMFIYSNGDKEDGRFTAQLNKASQYVSLLIRDSQPSDSATYLCAVTPGSGTYKYIFGTGTRLKVLANIIQNPDPAVYQLRDSKSSDKSVCLFTDFDSQTNVSQSKDSDVYITDKTVLDMRSMDFKSNSAVAWSNKSDFACANAFNNSIIPEDTFFPSPESSCDVKLVEKSFETDTNLNFQNLSVIGFRILLLKVAGFNLLMTLRLWS

SEQ ID NO: 40 - protein, 313 aa, Homo sapiens
MSIGLLCCAALSLLWAGPVNAGVTQTPKFQVLKTGQSMTLQCAQDMNHEYMSWYRQDPGMGLRLIHYSVGAGITDQGEVPNGYNVSRSTTEDFPLRLLSAAPSQTSVYFCASSPPGGSGANVLTFGAGSRLTVLEDLKNVFPPEVAVFEPSEAEISHTQKATLVCLATGFYPDHVELSWWVNGKEVHSGVSTDPQPLKEQPALNDSRYCLSSRLRVSATFWQNPRNHFRCQVQFYGLSENDEWTQDRAKPVTQIVSAEAWGRADCGFTSESYQQGVLSATILYEILLGKATLYAVLVSALVLMAMVKRKDSRG

SEQ ID NO: 41 - protein, 270 aa, Homo sapiens
MTSIRAVFIFLWLQLDLVNGENVEQHPSTLSVQEGDSAVIKCTYSDSASNYFPWYKQELGKGPQLIIDIRSNVGEKKDQRIAVTLNKTAKHFSLHITETQPEDSAVYFCAAPKNNNDMRFGAGTRLTVKPNIQNPDPAVYQLRDSKSSDKSVCLFTDFDSQTNVSQSKDSDVYITDKTVLDMRSMDFKSNSAVAWSNKSDFACANAFNNSIIPEDTFFPSPESSCDVKLVEKSFETDTNLNFQNLSVIGFRILLLKVAGFNLLMTLRLWS

SEQ ID NO: 42 - protein, 312 aa, Homo sapiens
MSLGLLCCGAFSLLWAGPVNAGVTQTPKFRVLKTGQSMTLLCAQDMNHEYMYWYRQDPGMGLRLIHYSVGEGTTAKGEVPDGYNVSRLKKQNFLLGLESAAPSQTSVYFCASSYVTGAQETQYFGPGTRLLVLEDLKNVFPPEVAVFEPSEAEISHTQKATLVCLATGFYPDHVELSWWVNGKEVHSGVSTDPQPLKEQPALNDSRYCLSSRLRVSATFWQNPRNHFRCQVQFYGLSENDEWTQDRAKPVTQIVSAEAWGRADCGFTSESYQQGVLSATILYEILLGKATLYAVLVSALVLMAMVKRKDSRG

SEQ ID NO: 43 - protein, 279 aa, Homo sapiens
MACPGFLWALVISTCLEFSMAQTVTQSQPEMSVQEAETVTLSCTYDTSESDYYLFWYKQPPSRQMILVIRQEAYKQQNATENRFSVNFQKAAKSFSLKISDSQLGDAAMYFCAYRSWMNYGGSQGNLIFGKGTKLSVKPNIQNPDPAVYQLRDSKSSDKSVCLFTDFDSQTNVSQSKDSDVYITDKTVLDMRSMDFKSNSAVAWSNKSDFACANAFNNSIIPEDTFFPSPESSCDVKLVEKSFETDTNLNFQNLSVIGFRILLLKVAGFNLLMTLRLWS

SEQ ID NO: 44 - protein, 313 aa, Homo sapiens
MSIGLLCCAALSLLWAGPVNAGVTQTPKFQVLKTGQSMTLQCAQDMNHEYMSWYRQDPGMGLRLIHYSVGAGITDQGEVPNGYNVSRSTTEDFPLRLLSAAPSQTSVYFCASSPFGGPNTGELFFGEGSRLTVLEDLKNVFPPEVAVFEPSEAEISHTQKATLVCLATGFYPDHVELSWWVNGKEVHSGVSTDPQPLKEQPALNDSRYCLSSRLRVSATFWQNPRNHFRCQVQFYGLSENDEWTQDRAKPVTQIVSAEAWGRADCGFTSESYQQGVLSATILYEILLGKATLYAVLVSALVLMAMVKRKDSRG

SEQ ID NO: 45 - protein, 269 aa, Homo sapiens
MLLITSMLVLWMQLSQVNGQQVMQIPQYQHVQEGEDFTTYCNSSTTLSNIQWYKQRPGGHPVFLIQLVKSGEVKKQKRLTFQFGEAKKNSSLHITATQTTDVGTYFCAGRGNYGQNFVFGPGTRLSVLPYIQNPDPAVYQLRDSKSSDKSVCLFTDFDSQTNVSQSKDSDVYITDKTVLDMRSMDFKSNSAVAWSNKSDFACANAFNNSIIPEDTFFPSPESSCDVKLVEKSFETDTNLNFQNLSVIGFRILLLKVAGFNLLMTLRLWS

SEQ ID NO: 46 - protein, 311 aa, Homo sapiens
MGPGLLCWVLLCLLGAGSVETGVTQSPTHLIKTRGQQVTLRCSSQSGHNTVSWYQQALGQGPQFIFQYYREEENGRGNFPPRFSGLQFPNYSSELNVNALELDDSALYLCASSPGTGVLNTEAFFGQGTRLTVVEDLNKVFPPEVAVFEPSEAEISHTQKATLVCLATGFFPDHVELSWWVNGKEVHSGVSTDPQPLKEQPALNDSRYCLSSRLRVSATFWQNPRNHFRCQVQFYGLSENDEWTQDRAKPVTQIVSAEAWGRADCGFTSVSYQQGVLSATILYEILLGKATLYAVLVSALVLMAMVKRKDF

SEQ ID NO: 47 - protein, 273 aa, Homo sapiens
MEKMLECAFIVLWLQLGWLSGEDQVTQSPEALRLQEGESSSLNCSYTVSGLRGLFWYRQDPGKGPEFLFTLYSAGEEKEKERLKATLTKKESFLHITAPKPEDSATYLCAVQARSSNTGKLIFGQGTTLQVKPDIQNPDPAVYQLRDSKSSDKSVCLFTDFDSQTNVSQSKDSDVYITDKTVLDMRSMDFKSNSAVAWSNKSDFACANAFNNSIIPEDTFFPSPESSCDVKLVEKSFETDTNLNFQNLSVIGFRILLLKVAGFNLLMTLRLWS

SEQ ID NO: 48 - protein, 310 aa, Homo sapiens
MGTSLLCWMALCLLGADHADTGVSQNPRHKITKRGQNVTFRCDPISEHNRLYWYRQTLGQGPEFLTYFQNEAQLEKSRLLSDRFSAERPKGSFSTLEIQRTEQGDSAMYLCASSWIEGNQPQHFGDGTRLSILEDLNKVFPPEVAVFEPSEAEISHTQKATLVCLATGFFPDHVELSWWVNGKEVHSGVSTDPQPLKEQPALNDSRYCLSSRLRVSATFWQNPRNHFRCQVQFYGLSENDEWTQDRAKPVTQIVSAEAWGRADCGFTSVSYQQGVLSATILYEILLGKATLYAVLVSALVLMAMVKRKDF

SEQ ID NO: 49 - protein, 283 aa, Homo sapiens
MDKILGASFLVLWLQLCWVSGQQKEKSDQQQVKQSPQSLIVQKGGISIINCAYENTAFDYFPWYQQFPGKGPALLIAIRPDVSEKKEGRFTISFNKSAKQFSLHIMDSQPGDSATYFCAASMWGGEYGNKLVFGAGTILRVKSYIQNPDPAVYQLRDSKSSDKSVCLFTDFDSQTNVSQSKDSDVYITDKTVLDMRSMDFKSNSAVAWSNKSDFACANAFNNSIIPEDTFFPSPESSCDVKLVEKSFETDTNLNFQNLSVIGFRILLLKVAGFNLLMTLRLWS

SEQ ID NO: 50 - protein, 311 aa, Homo sapiens
MSISLLCCAAFPLLWAGPVNAGVTQTPKFRILKIGQSMTLQCTQDMNHNYMYWYRQDPGMGLKLIYYSVGAGITDKGEVPNGYNVSRSTTEDFPLRLELAAPSQTSVYFCASSYVASYNEQFFGPGTRLTVLEDLKNVFPPEVAVFEPSEAEISHTQKATLVCLATGFYPDHVELSWWVNGKEVHSGVSTDPQPLKEQPALNDSRYCLSSRLRVSATFWQNPRNHFRCQVQFYGLSENDEWTQDRAKPVTQIVSAEAWGRADCGFTSESYQQGVLSATILYEILLGKATLYAVLVSALVLMAMVKRKDSRG

SEQ ID NO: 51 - protein, 272 aa, Homo sapiens
MAGIRALFMYLWLQLDWVSRGESVGLHLPTLSVQEGDNSIINCAYSNSASDYFIWYKQESGKGPQFIIDIRSNMDKRQGQRVTVLLNKTVKHLSLQIAATQPGDSAVYFCAETNNAGNMLTFGGGTRLMVKPHIQNPDPAVYQLRDSKSSDKSVCLFTDFDSQTNVSQSKDSDVYITDKTVLDMRSMDFKSNSAVAWSNKSDFACANAFNNSIIPEDTFFPSPESSCDVKLVEKSFETDTNLNFQNLSVIGFRILLLKVAGFNLLMTLRLWS

SEQ ID NO: 52 - protein, 311 aa, Homo sapiens
MGCRLLCCAVLCLLGAVPIDTEVTQTPKHLVMGMTNKKSLKCEQHMGHRAMYWYKQKAKKPPELMFVYSYEKLSINESVPSRFSPECPNSSLLNLHLHALQPEDSALYLCASTFDRAPGELFFGEGSRLTVLEDLKNVFPPEVAVFEPSEAEISHTQKATLVCLATGFYPDHVELSWWVNGKEVHSGVSTDPQPLKEQPALNDSRYCLSSRLRVSATFWQNPRNHFRCQVQFYGLSENDEWTQDRAKPVTQIVSAEAWGRADCGFTSESYQQGVLSATILYEILLGKATLYAVLVSALVLMAMVKRKDSRG

SEQ ID NO: 53 - protein, 275 aa, Homo sapiens
MSLSSLLKVVTASLWLGPGIAQKITQTQPGMFVQEKEAVTLDCTYDTSDPSYGLFWYKQPSSGEMIFLIYQGSYDQQNATEGRYSLNFQKARKSANLVISASQLGDSAMYFCAMGPMDSSYKLIFGSGTRLLVRPDIQNPDPAVYQLRDSKSSDKSVCLFTDFDSQTNVSQSKDSDVYITDKTVLDMRSMDFKSNSAVAWSNKSDFACANAFNNSIIPEDTFFPSPESSCDVKLVEKSFETDTNLNFQNLSVIGFRILLLKVAGFNLLMTLRLWS

SEQ ID NO: 54 - protein, 312 aa, Homo sapiens
MGTSLLCWMALCLLGADHADTGVSQNPRHKITKRGQNVTFRCDPISEHNRLYWYRQTLGQGPEFLTYFQNEAQLEKSRLLSDRFSAERPKGSFSTLEIQRTEQGDSAMYLCASSLAGGPDTQYFGPGTRLTVLEDLKNVFPPEVAVFEPSEAEISHTQKATLVCLATGFYPDHVELSWWVNGKEVHSGVSTDPQPLKEQPALNDSRYCLSSRLRVSATFWQNPRNHFRCQVQFYGLSENDEWTQDRAKPVTQIVSAEAWGRADCGFTSESYQQGVLSATILYEILLGKATLYAVLVSALVLMAMVKRKDSRG

SEQ ID NO: 55 - protein, 267 aa, Homo sapiens
MKLVTSITVLLSLGIMGDAKTTQPNSMESNEEEPVHLPCNHSTISGTDYIHWYRQLPSQGPEYVIHGLTSNVNNRMASLAIAEDRKSSTLILHRATLRDAAVYYCILRVGGNNDMRFGAGTRLTVKPNIQNPDPAVYQLRDSKSSDKSVCLFTDFDSQTNVSQSKDSDVYITDKTVLDMRSMDFKSNSAVAWSNKSDFACANAFNNSIIPEDTFFPSPESSCDVKLVEKSFETDTNLNFQNLSVIGFRILLLKVAGFNLLMTLRLWS

SEQ ID NO: 56 - protein, 311 aa, Homo sapiens
MSIGLLCCVAFSLLWASPVNAGVTQTPKFQVLKTGQSMTLQCAQDMNHNSMYWYRQDPGMGLRLIYYSASEGTTDKGEVPNGYNVSRLNKREFSLRLESAAPSQTSVYFCASSDWDRGNEQFFGPGTRLTVLEDLKNVFPPEVAVFEPSEAEISHTQKATLVCLATGFYPDHVELSWWVNGKEVHSGVSTDPQPLKEQPALNDSRYCLSSRLRVSATFWQNPRNHFRCQVQFYGLSENDEWTQDRAKPVTQIVSAEAWGRADCGFTSESYQQGVLSATILYEILLGKATLYAVLVSALVLMAMVKRKDSRG

SEQ ID NO: 57 - protein, 275 aa, Homo sapiens
MLTASLLRAVIASICVVSSMAQKVTQAQTEISVVEKEDVTLDCVYETRDTTYYLFWYKQPPSGELVFLIRRNSFDEQNEISGRYSWNFQKSTSSFNFTITASQVVDSAVYFCALSPAGSARQLTFGSGTQLTVLPDIQNPDPAVYQLRDSKSSDKSVCLFTDFDSQTNVSQSKDSDVYITDKTVLDMRSMDFKSNSAVAWSNKSDFACANAFNNSIIPEDTFFPSPESSCDVKLVEKSFETDTNLNFQNLSVIGFRILLLKVAGFNLLMTLRLWS

SEQ ID NO: 58 - protein, 313 aa, Homo sapiens
MDTWLVCWAIFSLLKAGLTEPEVTQTPSHQVTQMGQEVILRCVPISNHLYFYWYRQILGQKVEFLVSFYNNEISEKSEIFDDQFSVERPDGSNFTLKIRSTKLEDSAMYFCASGPDGALSYEQYFGPGTRLTVTEDLKNVFPPEVAVFEPSEAEISHTQKATLVCLATGFYPDHVELSWWVNGKEVHSGVSTDPQPLKEQPALNDSRYCLSSRLRVSATFWQNPRNHFRCQVQFYGLSENDEWTQDRAKPVTQIVSAEAWGRADCGFTSESYQQGVLSATILYEILLGKATLYAVLVSALVLMAMVKRKDSRG

SEQ ID NO: 59 - protein, 271 aa, Homo sapiens
MASAPISMLAMLFTLSGLRAQSVAQPEDQVNVAEGNPLTVKCTYSVSGNPYLFWYVQYPNRGLQFLLKYITGDNLVKGSYGFEAEFNKSQTSFHLKKPSALVSDSALYFCAVMLAGNMLTFGGGTRLMVKPHIQNPDPAVYQLRDSKSSDKSVCLFTDFDSQTNVSQSKDSDVYITDKTVLDMRSMDFKSNSAVAWSNKSDFACANAFNNSIIPEDTFFPSPESSCDVKLVEKSFETDTNLNFQNLSVIGFRILLLKVAGFNLLMTLRLWS

SEQ ID NO: 60 - protein, 306 aa, Homo sapiens
MSLGLLCCGAFSLLWAGPVNAGVTQTPKFRVLKTGQSMTLLCAQDMNHEYMYWYRQDPGMGLRLIHYSVGEGTTAKGEVPDGYNVSRLKKQNFLLGLESAAPSQTSVYFCASSRGQPQHFGDGTRLSILEDLNKVFPPEVAVFEPSEAEISHTQKATLVCLATGFFPDHVELSWWVNGKEVHSGVSTDPQPLKEQPALNDSRYCLSSRLRVSATFWQNPRNHFRCQVQFYGLSENDEWTQDRAKPVTQIVSAEAWGRADCGFTSVSYQQGVLSATILYEILLGKATLYAVLVSALVLMAMVKRKDF

SEQ ID NO: 61 - protein, 273 aa, Homo sapiens
MEKMLECAFIVLWLQLGWLSGEDQVTQSPEALRLQEGESSSLNCSYTVSGLRGLFWYRQDPGKGPEFLFTLYSAGEEKEKERLKATLTKKESFLHITAPKPEDSATYLCAAGDGSSNTGKLIFGQGTTLQVKPDIQNPDPAVYQLRDSKSSDKSVCLFTDFDSQTNVSQSKDSDVYITDKTVLDMRSMDFKSNSAVAWSNKSDFACANAFNNSIIPEDTFFPSPESSCDVKLVEKSFETDTNLNFQNLSVIGFRILLLKVAGFNLLMTLRLWS

SEQ ID NO: 62 - protein, 311 aa, Homo sapiens
MGTSLLCWMALCLLGADHADTGVSQNPRHKITKRGQNVTFRCDPISEHNRLYWYRQTLGQGPEFLTYFQNEAQLEKSRLLSDRFSAERPKGSFSTLEIQRTEQGDSAMYLCASSLVERSGNTIYFGEGSWLTVVEDLNKVFPPEVAVFEPSEAEISHTQKATLVCLATGFFPDHVELSWWVNGKEVHSGVSTDPQPLKEQPALNDSRYCLSSRLRVSATFWQNPRNHFRCQVQFYGLSENDEWTQDRAKPVTQIVSAEAWGRADCGFTSVSYQQGVLSATILYEILLGKATLYAVLVSALVLMAMVKRKDF

SEQ ID NO: 63 - protein, 272 aa, Homo sapiens
MLLEHLLIILWMQLTWVSGQQLNQSPQSMFIQEGEDVSMNCTSSSIFNTWLWYKQEPGEGPVLLIALYKAGELTSNGRLTAQFGITRKDSFLNISASIPSDVGIYFCAGRTMGSSNTGKLIFGQGTTLQVKPDIQNPDPAVYQLRDSKSSDKSVCLFTDFDSQTNVSQSKDSDVYITDKTVLDMRSMDFKSNSAVAWSNKSDFACANAFNNSIIPEDTFFPSPESSCDVKLVEKSFETDTNLNFQNLSVIGFRILLLKVAGFNLLMTLRLWS

SEQ ID NO: 64 - protein, 311 aa, Homo sapiens
MGPRLLFWALLCLLGTGPVEAGVTQSPTHLIKTRGQQATLRCSPISGHTSVYWYQQALGLGLQFLLWYDEGEERNRGNFPPRFSGRQFPNYSSELNVNALELEDSALYLCASRGGVSQPNTEAFFGQGTRLTVVEDLNKVFPPEVAVFEPSEAEISHTQKATLVCLATGFFPDHVELSWWVNGKEVHSGVSTDPQPLKEQPALNDSRYCLSSRLRVSATFWQNPRNHFRCQVQFYGLSENDEWTQDRAKPVTQIVSAEAWGRADCGFTSVSYQQGVLSATILYEILLGKATLYAVLVSALVLMAMVKRKDF

SEQ ID NO: 65 - protein, 273 aa, Homo sapiens
MLLEHLLIILWMQLTWVSGQQLNQSPQSMFIQEGEDVSMNCTSSSIFNTWLWYKQEPGEGPVLLIALYKAGELTSNGRLTAQFGITRKDSFLNISASIPSDVGIYFCAGQATTDSWGKLQFEFGAGTQVVVTPDIQNPDPAVYQLRDSKSSDKSVCLFTDFDSQTNVSQSKDSDVYITDKTVLDMRSMDFKSNSAVAWSNKSDFACANAFNNSIIPEDTFFPSPESSCDVKLVEKSFETDTNLNFQNLSVIGFRILLLKVAGFNLLMTLRLWS

SEQ ID NO: 66 - protein, 307 aa, Homo sapiens
MGPGLLHWMALCLLGTGHGDAMVIQNPRYQVTQFGKPVTLSCSQTLNHNVMYWYQQKSSQAPKLLFHYYDKDFNNEADTPDNFQSRRPNTSFCFLDIRSPGLGDTAMYLCATSRENSPLHFGNGTRLTVTEDLNKVFPPEVAVFEPSEAEISHTQKATLVCLATGFFPDHVELSWWVNGKEVHSGVSTDPQPLKEQPALNDSRYCLSSRLRVSATFWQNPRNHFRCQVQFYGLSENDEWTQDRAKPVTQIVSAEAWGRADCGFTSVSYQQGVLSATILYEILLGKATLYAVLVSALVLMAMVKRKDF

SEQ ID NO: 67 - protein, 269 aa, Homo sapiens
MVLKFSVSILWIQLAWVSTQLLEQSPQFLSIQEGENLTVYCNSSSVFSSLQWYRQEPGEGPVLLVTVVTGGEVKKLKRLTFQFGDARKDSSLHITAAQPGDTGLYLCAVENSGNTPLVFGKGTRLSVIANIQNPDPAVYQLRDSKSSDKSVCLFTDFDSQTNVSQSKDSDVYITDKTVLDMRSMDFKSNSAVAWSNKSDFACANAFNNSIIPEDTFFPSPESSCDVKLVEKSFETDTNLNFQNLSVIGFRILLLKVAGFNLLMTLRLWS

SEQ ID NO: 68 - protein, 309 aa, Homo sapiens
MSISLLCCAAFPLLWAGPVNAGVTQTPKFRILKIGQSMTLQCTQDMNHNYMYWYRQDPGMGLKLIYYSVGAGITDKGEVPNGYNVSRSTTEDFPLRLELAAPSQTSVYFCASSWTGMNTEAFFGQGTRLTVVEDLNKVFPPEVAVFEPSEAEISHTQKATLVCLATGFFPDHVELSWWVNGKEVHSGVSTDPQPLKEQPALNDSRYCLSSRLRVSATFWQNPRNHFRCQVQFYGLSENDEWTQDRAKPVTQIVSAEAWGRADCGFTSVSYQQGVLSATILYEILLGKATLYAVLVSALVLMAMVKRKDF

SEQ ID NO: 69 - protein, 264 aa, Homo sapiens
MWGVFLLYVSMKMGGTTGQNIDQPTEMTATEGAIVQINCTYQTSGFNGLFWYQQHAGEAPTFLSYNVLDGLEEKGRFSSFLSRSKGYSYLLLKELQMKDSASYLCACRGQNFVFGPGTRLSVLPYIQNPDPAVYQLRDSKSSDKSVCLFTDFDSQTNVSQSKDSDVYITDKTVLDMRSMDFKSNSAVAWSNKSDFACANAFNNSIIPEDTFFPSPESSCDVKLVEKSFETDTNLNFQNLSVIGFRILLLKVAGFNLLMTLRLWS

SEQ ID NO: 70 - protein, 309 aa, Homo sapiens
MGPQLLGYVVLCLLGAGPLEAQVTQNPRYLITVTGKKLTVTCSQNMNHEYMSWYRQDPGLGLRQIYYSMNVEVTDKGDVPEGYKVSRKEKRNFPLILESPSPNQTSLYFCASRGLTGELFFGEGSRLTVLEDLKNVFPPEVAVFEPSEAEISHTQKATLVCLATGFYPDHVELSWWVNGKEVHSGVSTDPQPLKEQPALNDSRYCLSSRLRVSATFWQNPRNHFRCQVQFYGLSENDEWTQDRAKPVTQIVSAEAWGRADCGFTSESYQQGVLSATILYEILLGKATLYAVLVSALVLMAMVKRKDSRG

SEQ ID NO: 71 - protein, 271 aa, Homo sapiens
MLLEHLLIILWMQLTWVSGQQLNQSPQSMFIQEGEDVSMNCTSSSIFNTWLWYKQEPGEGPVLLIALYKAGELTSNGRLTAQFGITRKDSFLNISASIPSDVGIYFCAGQLSVTNAGKSTFGDGTTLTVKPNIQNPDPAVYQLRDSKSSDKSVCLFTDFDSQTNVSQSKDSDVYITDKTVLDMRSMDFKSNSAVAWSNKSDFACANAFNNSIIPEDTFFPSPESSCDVKLVEKSFETDTNLNFQNLSVIGFRILLLKVAGFNLLMTLRLWS

SEQ ID NO: 72 - protein, 313 aa, Homo sapiens
MGTRLLFWVAFCLLGADHTGAGVSQSPSNKVTEKGKDVELRCDPISGHTALYWYRQSLGQGLEFLIYFQGNSAPDKSGLPSDRFSAERTGGSVSTLTIQRTQQEDSAVYLCASSPRWPKHVEQFFGPGTRLTVLEDLKNVFPPEVAVFEPSEAEISHTQKATLVCLATGFYPDHVELSWWVNGKEVHSGVSTDPQPLKEQPALNDSRYCLSSRLRVSATFWQNPRNHFRCQVQFYGLSENDEWTQDRAKPVTQIVSAEAWGRADCGFTSESYQQGVLSATILYEILLGKATLYAVLVSALVLMAMVKRKDSRG

SEQ ID NO: 73 - protein, 265 aa, Homo sapiens
MWGVFLLYVSMKMGGTTGQNIDQPTEMTATEGAIVQINCTYQTSGFNGLFWYQQHAGEAPTFLSYNVLDGLEEKGRFSSFLSRSKGYSYLLLKELQMKDSASYLCAVKDAGKSTFGDGTTLTVKPNIQNPDPAVYQLRDSKSSDKSVCLFTDFDSQTNVSQSKDSDVYITDKTVLDMRSMDFKSNSAVAWSNKSDFACANAFNNSIIPEDTFFPSPESSCDVKLVEKSFETDTNLNFQNLSVIGFRILLLKVAGFNLLMTLRLWS

SEQ ID NO: 74 - protein, 315 aa, Homo sapiens
MSIGLLCCAALSLLWAGPVNAGVTQTPKFQVLKTGQSMTLQCAQDMNHEYMSWYRQDPGMGLRLIHYSVGAGITDQGEVPNGYNVSRSTTEDFPLRLLSAAPSQTSVYFCASSYPPSGPDSYNEQFFGPGTRLTVLEDLKNVFPPEVAVFEPSEAEISHTQKATLVCLATGFYPDHVELSWWVNGKEVHSGVSTDPQPLKEQPALNDSRYCLSSRLRVSATFWQNPRNHFRCQVQFYGLSENDEWTQDRAKPVTQIVSAEAWGRADCGFTSESYQQGVLSATILYEILLGKATLYAVLVSALVLMAMVKRKDSRG

SEQ ID NO: 75 - protein, 276 aa, Homo sapiens
MLTASLLRAVIASICVVSSMAQKVTQAQTEISVVEKEDVTLDCVYETRDTTYYLFWYKQPPSGELVFLIRRNSFDEQNEISGRYSWNFQKSTSSFNFTITASQVVDSAVYFCALSEAQYTGNQFYFGTGTSLTVIPNIQNPDPAVYQLRDSKSSDKSVCLFTDFDSQTNVSQSKDSDVYITDKTVLDMRSMDFKSNSAVAWSNKSDFACANAFNNSIIPEDTFFPSPESSCDVKLVEKSFETDTNLNFQNLSVIGFRILLLKVAGFNLLMTLRLWS

SEQ ID NO: 76 - protein, 311 aa, Homo sapiens
MGFRLLCCVAFCLLGAGPVDSGVTQTPKHLITATGQRVTLRCSPRSGDLSVYWYQQSLDQGLQFLIQYYNGEERAKGNILERFSAQQFPDLHSELNLSSLELGDSALYFCASSGTGGTDTQYFGPGTRLTVLEDLKNVFPPEVAVFEPSEAEISHTQKATLVCLATGFYPDHVELSWWVNGKEVHSGVSTDPQPLKEQPALNDSRYCLSSRLRVSATFWQNPRNHFRCQVQFYGLSENDEWTQDRAKPVTQIVSAEAWGRADCGFTSESYQQGVLSATILYEILLGKATLYAVLVSALVLMAMVKRKDSRG

SEQ ID NO: 77 - protein, 272 aa, Homo sapiens
MMKSLRVLLVILWLQLSWVWSQQKEVEQDPGPLSVPEGAIVSLNCTYSNSAFQYFMWYRQYSRKGPELLMYTYSSGNKEDGRFTAQVDKSSKYISLFIRDSQPSDSATYLCAILQGAQKLVFGQGTRLTINPNIQNPDPAVYQLRDSKSSDKSVCLFTDFDSQTNVSQSKDSDVYITDKTVLDMRSMDFKSNSAVAWSNKSDFACANAFNNSIIPEDTFFPSPESSCDVKLVEKSFETDTNLNFQNLSVIGFRILLLKVAGFNLLMTLRLWS

SEQ ID NO: 78 - protein, 308 aa, Homo sapiens
MGPQLLGYVVLCLLGAGPLEAQVTQNPRYLITVTGKKLTVTCSQNMNHEYMSWYRQDPGLGLRQIYYSMNVEVTDKGDVPEGYKVSRKEKRNFPLILESPSPNQTSLYFCASSLEGRPYFGPGTRLTVTEDLKNVFPPEVAVFEPSEAEISHTQKATLVCLATGFYPDHVELSWWVNGKEVHSGVSTDPQPLKEQPALNDSRYCLSSRLRVSATFWQNPRNHFRCQVQFYGLSENDEWTQDRAKPVTQIVSAEAWGRADCGFTSESYQQGVLSATILYEILLGKATLYAVLVSALVLMAMVKRKDSRG

SEQ ID NO: 79 - protein, 270 aa, Homo sapiens
MISLRVLLVILWLQLSWVWSQRKEVEQDPGPFNVPEGATVAFNCTYSNSASQSFFWYRQDCRKEPKLLMSVYSSGNEDGRFTAQLNRASQYISLLIRDSKLSDSATYLCVTENTDKLIFGTGTRLQVFPNIIQNPDPAVYQLRDSKSSDKSVCLFTDFDSQTNVSQSKDSDVYITDKTVLDMRSMDFKSNSAVAWSNKSDFACANAFNNSIIPEDTFFPSPESSCDVKLVEKSFETDTNLNFQNLSVIGFRILLLKVAGFNLLMTLRLWS

SEQ ID NO: 80 - protein, 311 aa, Homo sapiens
MLSLLLLLLGLGSVFSAVISQKPSRDICQRGTSLTIQCQVDSQVTMMFWYRQQPGQSLTLIATANQGSEATYESGFVIDKFPISRPNLTFSTLTVSNMSPEDSSIYLCSVEVWGGGAADTQYFGPGTRLTVLEDLKNVFPPEVAVFEPSEAEISHTQKATLVCLATGFYPDHVELSWWVNGKEVHSGVSTDPQPLKEQPALNDSRYCLSSRLRVSATFWQNPRNHFRCQVQFYGLSENDEWTQDRAKPVTQIVSAEAWGRADCGFTSESYQQGVLSATILYEILLGKATLYAVLVSALVLMAMVKRKDSRG

SEQ ID NO: 81 - protein, 275 aa, Homo sapiens
MLTASLLRAVIASICVVSSMAQKVTQAQTEISVVEKEDVTLDCVYETRDTTYYLFWYKQPPSGELVFLIRRNSFDEQNEISGRYSWNFQKSTSSFNFTITASQVVDSAVYFCALSHSGSARQLTFGSGTQLTVLPDIQNPDPAVYQLRDSKSSDKSVCLFTDFDSQTNVSQSKDSDVYITDKTVLDMRSMDFKSNSAVAWSNKSDFACANAFNNSIIPEDTFFPSPESSCDVKLVEKSFETDTNLNFQNLSVIGFRILLLKVAGFNLLMTLRLWS

SEQ ID NO: 82 - protein, 313 aa, Homo sapiens
MDTWLVCWAIFSLLKAGLTEPEVTQTPSHQVTQMGQEVILRCVPISNHLYFYWYRQILGQKVEFLVSFYNNEISEKSEIFDDQFSVERPDGSNFTLKIRSTKLEDSAMYFCAIGTGEERSYEQYFGPGTRLTVTEDLKNVFPPEVAVFEPSEAEISHTQKATLVCLATGFYPDHVELSWWVNGKEVHSGVSTDPQPLKEQPALNDSRYCLSSRLRVSATFWQNPRNHFRCQVQFYGLSENDEWTQDRAKPVTQIVSAEAWGRADCGFTSESYQQGVLSATILYEILLGKATLYAVLVSALVLMAMVKRKDSRG

SEQ ID NO: 83 - protein, 272 aa, Homo sapiens
MNYSPGLVSLILLLLGRTRGNSVTQMEGPVTLSEEAFLTINCTYTATGYPSLFWYVQYPGEGLQLLLKATKADDKGSNKGFEATYRKETTSFHLEKGSVQVSDSAVYFCALSSGGGADGLTFGKGTHLIIQPYIQNPDPAVYQLRDSKSSDKSVCLFTDFDSQTNVSQSKDSDVYITDKTVLDMRSMDFKSNSAVAWSNKSDFACANAFNNSIIPEDTFFPSPESSCDVKLVEKSFETDTNLNFQNLSVIGFRILLLKVAGFNLLMTLRLWS

SEQ ID NO: 84 - protein, 312 aa, Homo sapiens
MGTRLLCWVVLGFLGTDHTGAGVSQSPRYKVAKRGQDVALRCDPISGHVSLFWYQQALGQGPEFLTYFQNEAQLDKSGLPSDRFFAERPEGSVSTLKIQRTQQEDSAVYLCASSLAKKKETQYFGPGTRLLVLEDLKNVFPPEVAVFEPSEAEISHTQKATLVCLATGFYPDHVELSWWVNGKEVHSGVSTDPQPLKEQPALNDSRYCLSSRLRVSATFWQNPRNHFRCQVQFYGLSENDEWTQDRAKPVTQIVSAEAWGRADCGFTSESYQQGVLSATILYEILLGKATLYAVLVSALVLMAMVKRKDSRG

SEQ ID NO: 85 - protein, 267 aa, Homo sapiens
MWGVFLLYVSMKMGGTTGQNIDQPTEMTATEGAIVQINCTYQTSGFNGLFWYQQHAGEAPTFLSYNVLDGLEEKGRFSSFLSRSKGYSYLLLKELQMKDSASYLCAVFQNRDDKIIFGKGTRLHILPNIQNPDPAVYQLRDSKSSDKSVCLFTDFDSQTNVSQSKDSDVYITDKTVLDMRSMDFKSNSAVAWSNKSDFACANAFNNSIIPEDTFFPSPESSCDVKLVEKSFETDTNLNFQNLSVIGFRILLLKVAGFNLLMTLRLWS

SEQ ID NO: 86 - protein, 310 aa, Homo sapiens
MGIRLLCRVAFCFLAVGLVDVKVTQSSRYLVKRTGEKVFLECVQDMDHENMFWYRQDPGLGLRLIYFSYDVKMKEKGDIPEGYSVSREKKERFSLILESASTNQTSMYLCASSPGRGSNQPQHFGDGTRLSILEDLNKVFPPEVAVFEPSEAEISHTQKATLVCLATGFFPDHVELSWWVNGKEVHSGVSTDPQPLKEQPALNDSRYCLSSRLRVSATFWQNPRNHFRCQVQFYGLSENDEWTQDRAKPVTQIVSAEAWGRADCGFTSVSYQQGVLSATILYEILLGKATLYAVLVSALVLMAMVKRKDF

SEQ ID NO: 87 - protein, 271 aa, Homo sapiens
MLLELIPLLGIHFVLRTARAQSVTQPDIHITVSEGASLELRCNYSYGATPYLFWYVQSPGQGLQLLLKYFSGDTLVQGIKGFEAEFKRSQSSFNLRKPSVHWSDAAEYFCAFNFGNEKLTFGTGTRLTIIPNIQNPDPAVYQLRDSKSSDKSVCLFTDFDSQTNVSQSKDSDVYITDKTVLDMRSMDFKSNSAVAWSNKSDFACANAFNNSIIPEDTFFPSPESSCDVKLVEKSFETDTNLNFQNLSVIGFRILLLKVAGFNLLMTLRLWS

SEQ ID NO: 88 - protein, 308 aa, Homo sapiens
MSIGLLCCVAFSLLWASPVNAGVTQTPKFQVLKTGQSMTLQCAQDMNHNSMYWYRQDPGMGLRLIYYSASEGTTDKGEVPNGYNVSRLNKREFSLRLESAAPSQTSVYFCASSDGAEQFFGPGTRLTVLEDLKNVFPPEVAVFEPSEAEISHTQKATLVCLATGFYPDHVELSWWVNGKEVHSGVSTDPQPLKEQPALNDSRYCLSSRLRVSATFWQNPRNHFRCQVQFYGLSENDEWTQDRAKPVTQIVSAEAWGRADCGFTSESYQQGVLSATILYEILLGKATLYAVLVSALVLMAMVKRKDSRG

SEQ ID NO: 89 - protein, 275 aa, Homo sapiens
MKSLRVLLVILWLQLSWVWSQQKEVEQNSGPLSVPEGAIASLNCTYSDRGSQSFFWYRQYSGKSPELIMFIYSNGDKEDGRFTAQLNKASQYVSLLIRDSQPSDSATYLCAEFNAGGTSYGKLTFGQGTILTVHPNIQNPDPAVYQLRDSKSSDKSVCLFTDFDSQTNVSQSKDSDVYITDKTVLDMRSMDFKSNSAVAWSNKSDFACANAFNNSIIPEDTFFPSPESSCDVKLVEKSFETDTNLNFQNLSVIGFRILLLKVAGFNLLMTLRLWS

SEQ ID NO: 90 - protein, 314 aa, Homo sapiens
MGTSLLCWMALCLLGADHADTGVSQNPRHKITKRGQNVTFRCDPISEHNRLYWYRQTLGQGPEFLTYFQNEAQLEKSRLLSDRFSAERPKGSFSTLEIQRTEQGDSAMYLCASSARGNRIDNEQFFGPGTRLTVLEDLKNVFPPEVAVFEPSEAEISHTQKATLVCLATGFYPDHVELSWWVNGKEVHSGVSTDPQPLKEQPALNDSRYCLSSRLRVSATFWQNPRNHFRCQVQFYGLSENDEWTQDRAKPVTQIVSAEAWGRADCGFTSESYQQGVLSATILYEILLGKATLYAVLVSALVLMAMVKRKDSRG

SEQ ID NO: 91 - protein, 272 aa, Homo sapiens
METLLGVSLVILWLQLARVNSQQGEEDPQALSIQEGENATMNCSYKTSINNLQWYRQNSGRGLVHLILIRSNEREKHSGRLRVTLDTSKKSSSLLITASRAADTASYFCATDSTGTDKLIFGTGTRLQVFPNIIQNPDPAVYQLRDSKSSDKSVCLFTDFDSQTNVSQSKDSDVYITDKTVLDMRSMDFKSNSAVAWSNKSDFACANAFNNSIIPEDTFFPSPESSCDVKLVEKSFETDTNLNFQNLSVIGFRILLLKVAGFNLLMTLRLWS

SEQ ID NO: 92 - protein, 311 aa, Homo sapiens
MGTSLLCWMALCLLGADHADTGVSQNPRHKITKRGQNVTFRCDPISEHNRLYWYRQTLGQGPEFLTYFQNEAQLEKSRLLSDRFSAERPKGSFSTLEIQRTEQGDSAMYLCASSLGPSNEQFFGPGTRLTVLEDLKNVFPPEVAVFEPSEAEISHTQKATLVCLATGFYPDHVELSWWVNGKEVHSGVSTDPQPLKEQPALNDSRYCLSSRLRVSATFWQNPRNHFRCQVQFYGLSENDEWTQDRAKPVTQIVSAEAWGRADCGFTSESYQQGVLSATILYEILLGKATLYAVLVSALVLMAMVKRKDSRG

SEQ ID NO: 93 - protein, 272 aa, Homo sapiens
MLLLLVPVLEVIFTLGGTRAQSVTQLGSHVSVSEGALVLLRCNYSSSVPPYLFWYVQYPNQGLQLLLKYTSAATLVKGINGFEAEFKKSETSFHLTKPSAHMSDAAEYFCAVTRNTGNQFYFGTGTSLTVIPNIQNPDPAVYQLRDSKSSDKSVCLFTDFDSQTNVSQSKDSDVYITDKTVLDMRSMDFKSNSAVAWSNKSDFACANAFNNSIIPEDTFFPSPESSCDVKLVEKSFETDTNLNFQNLSVIGFRILLLKVAGFNLLMTLRLWS

SEQ ID NO: 94 - protein, 313 aa, Homo sapiens
MGTRLLCWAALCLLGADHTGAGVSQTPSNKVTEKGKYVELRCDPISGHTALYWYRQSLGQGPEFLIYFQGTGAADDSGLPNDRFFAVRPEGSVSTLKIQRTERGDSAVYLCASSLLGGPGNEQFFGPGTRLTVLEDLKNVFPPEVAVFEPSEAEISHTQKATLVCLATGFYPDHVELSWWVNGKEVHSGVSTDPQPLKEQPALNDSRYCLSSRLRVSATFWQNPRNHFRCQVQFYGLSENDEWTQDRAKPVTQIVSAEAWGRADCGFTSESYQQGVLSATILYEILLGKATLYAVLVSALVLMAMVKRKDSRG

SEQ ID NO: 95 - protein, 271 aa, Homo sapiens
MLLELIPLLGIHFVLRTARAQSVTQPDIHITVSEGASLELRCNYSYGATPYLFWYVQSPGQGLQLLLKYFSGDTLVQGIKGFEAEFKRSQSSFNLRKPSVHWSDAAEYFCAGNLGNEKLTFGTGTRLTIIPNIQNPDPAVYQLRDSKSSDKSVCLFTDFDSQTNVSQSKDSDVYITDKTVLDMRSMDFKSNSAVAWSNKSDFACANAFNNSIIPEDTFFPSPESSCDVKLVEKSFETDTNLNFQNLSVIGFRILLLKVAGFNLLMTLRLWS

SEQ ID NO: 96 - protein, 308 aa, Homo sapiens
MSIGLLCCVAFSLLWASPVNAGVTQTPKFQVLKTGQSMTLQCAQDMNHNSMYWYRQDPGMGLRLIYYSASEGTTDKGEVPNGYNVSRLNKREFSLRLESAAPSQTSVYFCASSDGGEQYFGPGTRLTVTEDLKNVFPPEVAVFEPSEAEISHTQKATLVCLATGFYPDHVELSWWVNGKEVHSGVSTDPQPLKEQPALNDSRYCLSSRLRVSATFWQNPRNHFRCQVQFYGLSENDEWTQDRAKPVTQIVSAEAWGRADCGFTSESYQQGVLSATILYEILLGKATLYAVLVSALVLMAMVKRKDSRG

SEQ ID NO: 97 - protein, 275 aa, Homo sapiens
MMKCPQALLAIFWLLLSWVSSEDKVVQSPLSLVVHEGDTVTLNCSYEVTNFRSLLWYKQEKKAPTFLFMLTSSGIEKKSGRLSSILDKKELSSILNITATQTGDSAIYLCAVEAIAETSGSRLTFGEGTQLTVNPDIQNPDPAVYQLRDSKSSDKSVCLFTDFDSQTNVSQSKDSDVYITDKTVLDMRSMDFKSNSAVAWSNKSDFACANAFNNSIIPEDTFFPSPESSCDVKLVEKSFETDTNLNFQNLSVIGFRILLLKVAGFNLLMTLRLWS

SEQ ID NO: 98 - protein, 307 aa, Homo sapiens
MLCSLLALLLGTFFGVRSQTIHQWPATLVQPVGSPLSLECTVEGTSNPNLYWYRQAAGRGLQLLFYSVGIGQISSEVPQNLSASRPQDRQFILSSKKLLLSDSGFYLCASSGRRSNYGYTFGSGTRLTVVEDLNKVFPPEVAVFEPSEAEISHTQKATLVCLATGFFPDHVELSWWVNGKEVHSGVSTDPQPLKEQPALNDSRYCLSSRLRVSATFWQNPRNHFRCQVQFYGLSENDEWTQDRAKPVTQIVSAEAWGRADCGFTSVSYQQGVLSATILYEILLGKATLYAVLVSALVLMAMVKRKDF

SEQ ID NO: 99 - protein, 274 aa, Homo sapiens
MESFLGGVLLILWLQVDWVKSQKIEQNSEALNIQEGKTATLTCNYTNYSPAYLQWYRQDPGRGPVFLLLIRENEKEKRKERLKVTFDTTLKQSLFHITASQPADSATYLCALDMFTTGFQKLVFGTGTRLLVSPNIQNPDPAVYQLRDSKSSDKSVCLFTDFDSQTNVSQSKDSDVYITDKTVLDMRSMDFKSNSAVAWSNKSDFACANAFNNSIIPEDTFFPSPESSCDVKLVEKSFETDTNLNFQNLSVIGFRILLLKVAGFNLLMTLRLWS

SEQ ID NO: 100 - protein, 304 aa, Homo sapiens
MLCSLLALLLGTFFGVRSQTIHQWPATLVQPVGSPLSLECTVEGTSNPNLYWYRQAAGRGLQLLFYSVGIGQISSEVPQNLSASRPQDRQFILSSKKLLLSDSGFYLCAWRSSKGYTFGSGTRLTVVEDLNKVFPPEVAVFEPSEAEISHTQKATLVCLATGFFPDHVELSWWVNGKEVHSGVSTDPQPLKEQPALNDSRYCLSSRLRVSATFWQNPRNHFRCQVQFYGLSENDEWTQDRAKPVTQIVSAEAWGRADCGFTSVSYQQGVLSATILYEILLGKATLYAVLVSALVLMAMVKRKDF

SEQ ID NO: 101 - protein, 268 aa, Homo sapiens
MWGVFLLYVSMKMGGTTGQNIDQPTEMTATEGAIVQINCTYQTSGFNGLFWYQQHAGEAPTFLSYNVLDGLEEKGRFSSFLSRSKGYSYLLLKELQMKDSASYLCAVRDRNTDKLIFGTGTRLQVFPNIIQNPDPAVYQLRDSKSSDKSVCLFTDFDSQTNVSQSKDSDVYITDKTVLDMRSMDFKSNSAVAWSNKSDFACANAFNNSIIPEDTFFPSPESSCDVKLVEKSFETDTNLNFQNLSVIGFRILLLKVAGFNLLMTLRLWS

SEQ ID NO: 102 - protein, 312 aa, Homo sapiens
MSNQVLCCVVLCFLGANTVDGGITQSPKYLFRKEGQNVTLSCEQNLNHDAMYWYRQDPGQGLRLIYYSQIVNDFQKGDIAEGYSVSREKKESFPLTVTSAQKNPTAFYLCASSVLGMSARNQPQHFGDGTRLSILEDLNKVFPPEVAVFEPSEAEISHTQKATLVCLATGFFPDHVELSWWVNGKEVHSGVSTDPQPLKEQPALNDSRYCLSSRLRVSATFWQNPRNHFRCQVQFYGLSENDEWTQDRAKPVTQIVSAEAWGRADCGFTSVSYQQGVLSATILYEILLGKATLYAVLVSALVLMAMVKRKDF

SEQ ID NO: 103 - protein, 267 aa, Homo sapiens
MKRILGALLGLLSAQVCCVRGIQVEQSPPDLILQEGANSTLRCNFSDSVNNLQWFHQNPWGQLINLFYIPSGTKQNGRLSATTVATERYSLLYISSSQTTDSGVYFCAGIGNEKLTFGTGTRLTIIPNIQNPDPAVYQLRDSKSSDKSVCLFTDFDSQTNVSQSKDSDVYITDKTVLDMRSMDFKSNSAVAWSNKSDFACANAFNNSIIPEDTFFPSPESSCDVKLVEKSFETDTNLNFQNLSVIGFRILLLKVAGFNLLMTLRLWS

SEQ ID NO: 104 - protein, 312 aa, Homo sapiens
MGTSLLCWVVLGFLGTDHTGAGVSQSPRYKVTKRGQDVALRCDPISGHVSLYWYRQALGQGPEFLTYFNYEAQQDKSGLPNDRFSAERPEGSISTLTIQRTEQRDSAMYRCASSLGGSGNEQYFGPGTRLTVTEDLKNVFPPEVAVFEPSEAEISHTQKATLVCLATGFYPDHVELSWWVNGKEVHSGVSTDPQPLKEQPALNDSRYCLSSRLRVSATFWQNPRNHFRCQVQFYGLSENDEWTQDRAKPVTQIVSAEAWGRADCGFTSESYQQGVLSATILYEILLGKATLYAVLVSALVLMAMVKRKDSRG

SEQ ID NO: 105 - protein, 274 aa, Homo sapiens
MMKCPQALLAIFWLLLSWVSSEDKVVQSPLSLVVHEGDTVTLNCSYEVTNFRSLLWYKQEKKAPTFLFMLTSSGIEKKSGRLSSILDKKELSSILNITATQTGDSAIYLCAVEAVKSGNTPLVFGKGTRLSVIANIQNPDPAVYQLRDSKSSDKSVCLFTDFDSQTNVSQSKDSDVYITDKTVLDMRSMDFKSNSAVAWSNKSDFACANAFNNSIIPEDTFFPSPESSCDVKLVEKSFETDTNLNFQNLSVIGFRILLLKVAGFNLLMTLRLWS

SEQ ID NO: 106 - protein, 307 aa, Homo sapiens
MLCSLLALLLGTFFGVRSQTIHQWPATLVQPVGSPLSLECTVEGTSNPNLYWYRQAAGRGLQLLFYSVGIGQISSEVPQNLSASRPQDRQFILSSKKLLLSDSGFYLCAWSVSRRNYGYTFGSGTRLTVVEDLNKVFPPEVAVFEPSEAEISHTQKATLVCLATGFFPDHVELSWWVNGKEVHSGVSTDPQPLKEQPALNDSRYCLSSRLRVSATFWQNPRNHFRCQVQFYGLSENDEWTQDRAKPVTQIVSAEAWGRADCGFTSVSYQQGVLSATILYEILLGKATLYAVLVSALVLMAMVKRKDF

SEQ ID NO: 107 - protein, 274 aa, Homo sapiens
MLLLLVPVLEVIFTLGGTRAQSVTQLDSHVSVSEGTPVLLRCNYSSSYSPSLFWYVQHPNKGLQLLLKYTSAATLVKGINGFEAEFKKSETSFHLTKPSAHMSDAAEYFCVVILNSGGYQKVTFGIGTKLQVIPNIQNPDPAVYQLRDSKSSDKSVCLFTDFDSQTNVSQSKDSDVYITDKTVLDMRSMDFKSNSAVAWSNKSDFACANAFNNSIIPEDTFFPSPESSCDVKLVEKSFETDTNLNFQNLSVIGFRILLLKVAGFNLLMTLRLWS

SEQ ID NO: 108 - protein, 310 aa, Homo sapiens
MDTWLVCWAIFSLLKAGLTEPEVTQTPSHQVTQMGQEVILRCVPISNHLYFYWYRQILGQKVEFLVSFYNNEISEKSEIFDDQFSVERPDGSNFTLKIRSTKLEDSAMYFCAMQLETDGYGYTFGSGTRLTVVEDLNKVFPPEVAVFEPSEAEISHTQKATLVCLATGFFPDHVELSWWVNGKEVHSGVSTDPQPLKEQPALNDSRYCLSSRLRVSATFWQNPRNHFRCQVQFYGLSENDEWTQDRAKPVTQIVSAEAWGRADCGFTSVSYQQGVLSATILYEILLGKATLYAVLVSALVLMAMVKRKDF

SEQ ID NO: 109 - protein, 274 aa, Homo sapiens
MLTASLLRAVIASICVVSSMAQKVTQAQTEISVVEKEDVTLDCVYETRDTTYYLFWYKQPPSGELVFLIRRNSFDEQNEISGRYSWNFQKSTSSFNFTITASQVVDSAVYFCALSEDQDSTLTFGKGTMLLVSPDIQNPDPAVYQLRDSKSSDKSVCLFTDFDSQTNVSQSKDSDVYITDKTVLDMRSMDFKSNSAVAWSNKSDFACANAFNNSIIPEDTFFPSPESSCDVKLVEKSFETDTNLNFQNLSVIGFRILLLKVAGFNLLMTLRLWS

SEQ ID NO: 110 - protein, 307 aa, Homo sapiens
MLSLLLLLLGLGSVFSAVISQKPSRDICQRGTSLTIQCQVDSQVTMMFWYRQQPGQSLTLIATANQGSEATYESGFVIDKFPISRPNLTFSTLTVSNMSPEDSSIYLCSVDPSGWVHGYTFGSGTRLTVVEDLNKVFPPEVAVFEPSEAEISHTQKATLVCLATGFFPDHVELSWWVNGKEVHSGVSTDPQPLKEQPALNDSRYCLSSRLRVSATFWQNPRNHFRCQVQFYGLSENDEWTQDRAKPVTQIVSAEAWGRADCGFTSVSYQQGVLSATILYEILLGKATLYAVLVSALVLMAMVKRKDF

SEQ ID NO: 111 - protein, 277 aa, Homo sapiens
MLLELIPLLGIHFVLRTARAQSVTQPDIHITVSEGASLELRCNYSYGATPYLFWYVQSPGQGLQLLLKYFSGDTLVQGIKGFEAEFKRSQSSFNLRKPSVHWSDAAEYFCAVGAKYGLGGGADGLTFGKGTHLIIQPYIQNPDPAVYQLRDSKSSDKSVCLFTDFDSQTNVSQSKDSDVYITDKTVLDMRSMDFKSNSAVAWSNKSDFACANAFNNSIIPEDTFFPSPESSCDVKLVEKSFETDTNLNFQNLSVIGFRILLLKVAGFNLLMTLRLWS

SEQ ID NO: 112 - protein, 313 aa, Homo sapiens
MSISLLCCAAFPLLWAGPVNAGVTQTPKFRILKIGQSMTLQCTQDMNHNYMYWYRQDPGMGLKLIYYSVGAGITDKGEVPNGYNVSRSTTEDFPLRLELAAPSQTSVYFCASRERDQPGSYEQYFGPGTRLTVTEDLKNVFPPEVAVFEPSEAEISHTQKATLVCLATGFYPDHVELSWWVNGKEVHSGVSTDPQPLKEQPALNDSRYCLSSRLRVSATFWQNPRNHFRCQVQFYGLSENDEWTQDRAKPVTQIVSAEAWGRADCGFTSESYQQGVLSATILYEILLGKATLYAVLVSALVLMAMVKRKDSRG

SEQ ID NO: 113 - protein, 270 aa, Homo sapiens
MKTFAGFSFLFLWLQLDCMSRGEDVEQSLFLSVREGDSSVINCTYTDSSSTYLYWYKQEPGAGLQLLTYIFSNMDMKQDQRLTVLLNKKDKHLSLRIADTQTGDSAIYFCADGGYSTLTFGKGTMLLVSPDIQNPDPAVYQLRDSKSSDKSVCLFTDFDSQTNVSQSKDSDVYITDKTVLDMRSMDFKSNSAVAWSNKSDFACANAFNNSIIPEDTFFPSPESSCDVKLVEKSFETDTNLNFQNLSVIGFRILLLKVAGFNLLMTLRLWS

SEQ ID NO: 114 - protein, 319 aa, Homo sapiens
MLLLLLLLGPGISLLLPGSLAGSGLGAVVSQHPSWVICKSGTSVKIECRSLDFQATTMFWYRQFPKQSLMLMATSNEGSKATYEQGVEKDKFLINHASLTLSTLTVTSAHPEDSSFYICSARDVGTPGNTIYFGEGSWLTVVEDLNKVFPPEVAVFEPSEAEISHTQKATLVCLATGFFPDHVELSWWVNGKEVHSGVSTDPQPLKEQPALNDSRYCLSSRLRVSATFWQNPRNHFRCQVQFYGLSENDEWTQDRAKPVTQIVSAEAWGRADCGFTSVSYQQGVLSATILYEILLGKATLYAVLVSALVLMAMVKRKDF

SEQ ID NO: 115 - protein, 271 aa, Homo sapiens
MLLEHLLIILWMQLTWVSGQQLNQSPQSMFIQEGEDVSMNCTSSSIFNTWLWYKQEPGEGPVLLIALYKAGELTSNGRLTAQFGITRKDSFLNISASIPSDVGIYFCAGEVFMEYGNKLVFGAGTILRVKSYIQNPDPAVYQLRDSKSSDKSVCLFTDFDSQTNVSQSKDSDVYITDKTVLDMRSMDFKSNSAVAWSNKSDFACANAFNNSIIPEDTFFPSPESSCDVKLVEKSFETDTNLNFQNLSVIGFRILLLKVAGFNLLMTLRLWS

SEQ ID NO: 116 - protein, 310 aa, Homo sapiens
MGPQLLGYVVLCLLGAGPLEAQVTQNPRYLITVTGKKLTVTCSQNMNHEYMSWYRQDPGLGLRQIYYSMNVEVTDKGDVPEGYKVSRKEKRNFPLILESPSPNQTSLYFCASSSDGSYEQYFGPGTRLTVTEDLKNVFPPEVAVFEPSEAEISHTQKATLVCLATGFYPDHVELSWWVNGKEVHSGVSTDPQPLKEQPALNDSRYCLSSRLRVSATFWQNPRNHFRCQVQFYGLSENDEWTQDRAKPVTQIVSAEAWGRADCGFTSESYQQGVLSATILYEILLGKATLYAVLVSALVLMAMVKRKDSRG

SEQ ID NO: 117 - protein, 282 aa, Homo sapiens
MDKILGASFLVLWLQLCWVSGQQKEKSDQQQVKQSPQSLIVQKGGISIINCAYENTAFDYFPWYQQFPGKGPALLIAIRPDVSEKKEGRFTISFNKSAKQFSLHIMDSQPGDSATYFCAARGRGQAGTALIFGKGTTLSVSSNIQNPDPAVYQLRDSKSSDKSVCLFTDFDSQTNVSQSKDSDVYITDKTVLDMRSMDFKSNSAVAWSNKSDFACANAFNNSIIPEDTFFPSPESSCDVKLVEKSFETDTNLNFQNLSVIGFRILLLKVAGFNLLMTLRLWS

SEQ ID NO: 118 - protein, 308 aa, Homo sapiens
MRIRLLCCVAFSLLWAGPVIAGITQAPTSQILAAGRRMTLRCTQDMRHNAMYWYRQDLGLGLRLIHYSNTAGTTGKGEVPDGYSVSRANTDDFPLTLASAVPSQTSVYFCASSESGGKGYTFGSGTRLTVVEDLNKVFPPEVAVFEPSEAEISHTQKATLVCLATGFFPDHVELSWWVNGKEVHSGVSTDPQPLKEQPALNDSRYCLSSRLRVSATFWQNPRNHFRCQVQFYGLSENDEWTQDRAKPVTQIVSAEAWGRADCGFTSVSYQQGVLSATILYEILLGKATLYAVLVSALVLMAMVKRKDF

SEQ ID NO: 119 - protein, 272 aa, Homo sapiens
MKSLRVLLVILWLQLSWVWSQQKEVEQNSGPLSVPEGAIASLNCTYSDRGSQSFFWYRQYSGKSPELIMFIYSNGDKEDGRFTAQLNKASQYVSLLIRDSQPSDSATYLCAVNDNYGQNFVFGPGTRLSVLPYIQNPDPAVYQLRDSKSSDKSVCLFTDFDSQTNVSQSKDSDVYITDKTVLDMRSMDFKSNSAVAWSNKSDFACANAFNNSIIPEDTFFPSPESSCDVKLVEKSFETDTNLNFQNLSVIGFRILLLKVAGFNLLMTLRLWS

SEQ ID NO: 120 - protein, 310 aa, Homo sapiens
MSNQVLCCVVLCFLGANTVDGGITQSPKYLFRKEGQNVTLSCEQNLNHDAMYWYRQDPGQGLRLIYYSQIVNDFQKGDIAEGYSVSREKKESFPLTVTSAQKNPTAFYLCASSIPGGVIQPQHFGDGTRLSILEDLNKVFPPEVAVFEPSEAEISHTQKATLVCLATGFFPDHVELSWWVNGKEVHSGVSTDPQPLKEQPALNDSRYCLSSRLRVSATFWQNPRNHFRCQVQFYGLSENDEWTQDRAKPVTQIVSAEAWGRADCGFTSVSYQQGVLSATILYEILLGKATLYAVLVSALVLMAMVKRKDF

SEQ ID NO: 121 - protein, 272 aa, Homo sapiens
MLLELIPLLGIHFVLRTARAQSVTQPDIHITVSEGASLELRCNYSYGATPYLFWYVQSPGQGLQLLLKYFSGDTLVQGIKGFEAEFKRSQSSFNLRKPSVHWSDAAEYFCAVGAEYGNKLVFGAGTILRVKSYIQNPDPAVYQLRDSKSSDKSVCLFTDFDSQTNVSQSKDSDVYITDKTVLDMRSMDFKSNSAVAWSNKSDFACANAFNNSIIPEDTFFPSPESSCDVKLVEKSFETDTNLNFQNLSVIGFRILLLKVAGFNLLMTLRLWS

SEQ ID NO: 122 - protein, 316 aa, Homo sapiens
MASLLFFCGAFYLLGTGSMDADVTQTPRNRITKTGKRIMLECSQTKGHDRMYWYRQDPGLGLRLIYYSFDVKDINKGEISDGYSVSRQAQAKFSLSLESAIPNQTALYFCATSDLDRVRGLDTGELFFGEGSRLTVLEDLKNVFPPEVAVFEPSEAEISHTQKATLVCLATGFYPDHVELSWWVNGKEVHSGVSTDPQPLKEQPALNDSRYCLSSRLRVSATFWQNPRNHFRCQVQFYGLSENDEWTQDRAKPVTQIVSAEAWGRADCGFTSESYQQGVLSATILYEILLGKATLYAVLVSALVLMAMVKRKDSRG

SEQ ID NO: 123 - protein, 272 aa, Homo sapiens
MLLLLVPVLEVIFTLGGTRAQSVTQLGSHVSVSEGALVLLRCNYSSSVPPYLFWYVQYPNQGLQLLLKYTSAATLVKGINGFEAEFKKSETSFHLTKPSAHMSDAAEYFCAVSDNQGGKLIFGQGTELSVKPNIQNPDPAVYQLRDSKSSDKSVCLFTDFDSQTNVSQSKDSDVYITDKTVLDMRSMDFKSNSAVAWSNKSDFACANAFNNSIIPEDTFFPSPESSCDVKLVEKSFETDTNLNFQNLSVIGFRILLLKVAGFNLLMTLRLWS

SEQ ID NO: 124 - protein, 310 aa, Homo sapiens
MGCRLLCCAVLCLLGAVPIDTEVTQTPKHLVMGMTNKKSLKCEQHMGHRAMYWYKQKAKKPPELMFVYSYEKLSINESVPSRFSPECPNSSLLNLHLHALQPEDSALYLCASSQGDGGRSPLHFGNGTRLTVTEDLNKVFPPEVAVFEPSEAEISHTQKATLVCLATGFFPDHVELSWWVNGKEVHSGVSTDPQPLKEQPALNDSRYCLSSRLRVSATFWQNPRNHFRCQVQFYGLSENDEWTQDRAKPVTQIVSAEAWGRADCGFTSVSYQQGVLSATILYEILLGKATLYAVLVSALVLMAMVKRKDF

SEQ ID NO: 125 - protein, 275 aa, Homo sapiens
MACPGFLWALVISTCLEFSMAQTVTQSQPEMSVQEAETVTLSCTYDTSESDYYLFWYKQPPSRQMILVIRQEAYKQQNATENRFSVNFQKAAKSFSLKISDSQLGDAAMYFCAYRSLNRDDKIIFGKGTRLHILPNIQNPDPAVYQLRDSKSSDKSVCLFTDFDSQTNVSQSKDSDVYITDKTVLDMRSMDFKSNSAVAWSNKSDFACANAFNNSIIPEDTFFPSPESSCDVKLVEKSFETDTNLNFQNLSVIGFRILLLKVAGFNLLMTLRLWS

SEQ ID NO: 126 - protein, 307 aa, Homo sapiens
MGFRLLCCVAFCLLGAGPVDSGVTQTPKHLITATGQRVTLRCSPRSGDLSVYWYQQSLDQGLQFLIQYYNGEERAKGNILERFSAQQFPDLHSELNLSSLELGDSALYFCASRTGYDGYTFGSGTRLTVVEDLNKVFPPEVAVFEPSEAEISHTQKATLVCLATGFFPDHVELSWWVNGKEVHSGVSTDPQPLKEQPALNDSRYCLSSRLRVSATFWQNPRNHFRCQVQFYGLSENDEWTQDRAKPVTQIVSAEAWGRADCGFTSVSYQQGVLSATILYEILLGKATLYAVLVSALVLMAMVKRKDF

SEQ ID NO: 127 - protein, 275 aa, Homo sapiens
MAMLLGASVLILWLQPDWVNSQQKNDDQQVKQNSPSLSVQEGRISILNCDYTNSMFDYFLWYKKYPAEGPTFLISISSIKDKNEDGRFTVFLNKSAKHLSLHIVPSQPGDSAVYFCAAWGGRLMFGDGTQLVVKPNIQNPDPAVYQLRDSKSSDKSVCLFTDFDSQTNVSQSKDSDVYITDKTVLDMRSMDFKSNSAVAWSNKSDFACANAFNNSIIPEDTFFPSPESSCDVKLVEKSFETDTNLNFQNLSVIGFRILLLKVAGFNLLMTLRLWS

SEQ ID NO: 128 - protein, 308 aa, Homo sapiens
MGFRLLCCVAFCLLGAGPVDSGVTQTPKHLITATGQRVTLRCSPRSGDLSVYWYQQSLDQGLQFLIQYYNGEERAKGNILERFSAQQFPDLHSELNLSSLELGDSALYFCASQGQLNTEAFFGQGTRLTVVEDLNKVFPPEVAVFEPSEAEISHTQKATLVCLATGFFPDHVELSWWVNGKEVHSGVSTDPQPLKEQPALNDSRYCLSSRLRVSATFWQNPRNHFRCQVQFYGLSENDEWTQDRAKPVTQIVSAEAWGRADCGFTSVSYQQGVLSATILYEILLGKATLYAVLVSALVLMAMVKRKDF

SEQ ID NO: 129 - protein, 278 aa, Homo sapiens
MACPGFLWALVISTCLEFSMAQTVTQSQPEMSVQEAETVTLSCTYDTSESDYYLFWYKQPPSRQMILVIRQEAYKQQNATENRFSVNFQKAAKSFSLKISDSQLGDAAMYFCAYRTRFSNFGNEKLTFGTGTRLTIIPNIQNPDPAVYQLRDSKSSDKSVCLFTDFDSQTNVSQSKDSDVYITDKTVLDMRSMDFKSNSAVAWSNKSDFACANAFNNSIIPEDTFFPSPESSCDVKLVEKSFETDTNLNFQNLSVIGFRILLLKVAGFNLLMTLRLWS

SEQ ID NO: 130 - protein, 319 aa, Homo sapiens
MLLLLLLLGPGISLLLPGSLAGSGLGAVVSQHPSWVICKSGTSVKIECRSLDFQATTMFWYRQFPKQSLMLMATSNEGSKATYEQGVEKDKFLINHASLTLSTLTVTSAHPEDSSFYICSAGTSISGELFFGEGSRLTVLEDLKNVFPPEVAVFEPSEAEISHTQKATLVCLATGFYPDHVELSWWVNGKEVHSGVSTDPQPLKEQPALNDSRYCLSSRLRVSATFWQNPRNHFRCQVQFYGLSENDEWTQDRAKPVTQIVSAEAWGRADCGFTSESYQQGVLSATILYEILLGKATLYAVLVSALVLMAMVKRKDSRG

SEQ ID NO: 131 - protein, 277 aa, Homo sapiens
MLLEHLLIILWMQLTWVSGQQLNQSPQSMFIQEGEDVSMNCTSSSIFNTWLWYKQEPGEGPVLLIALYKAGELTSNGRLTAQFGITRKDSFLNISASIPSDVGIYFCAGQLREGSNAGGTSYGKLTFGQGTILTVHPNIQNPDPAVYQLRDSKSSDKSVCLFTDFDSQTNVSQSKDSDVYITDKTVLDMRSMDFKSNSAVAWSNKSDFACANAFNNSIIPEDTFFPSPESSCDVKLVEKSFETDTNLNFQNLSVIGFRILLLKVAGFNLLMTLRLWS

SEQ ID NO: 132 - protein, 307 aa, Homo sapiens
MSIGLLCCAALSLLWAGPVNAGVTQTPKFQVLKTGQSMTLQCAQDMNHEYMSWYRQDPGMGLRLIHYSVGAGITDQGEVPNGYNVSRSTTEDFPLRLLSAAPSQTSVYFCASSNTPRRVFFGQGTRLTVVEDLNKVFPPEVAVFEPSEAEISHTQKATLVCLATGFFPDHVELSWWVNGKEVHSGVSTDPQPLKEQPALNDSRYCLSSRLRVSATFWQNPRNHFRCQVQFYGLSENDEWTQDRAKPVTQIVSAEAWGRADCGFTSVSYQQGVLSATILYEILLGKATLYAVLVSALVLMAMVKRKDF

SEQ ID NO: 133 - protein, 273 aa, Homo sapiens
MSLSSLLKVVTASLWLGPGIAQKITQTQPGMFVQEKEAVTLDCTYDTSDPSYGLFWYKQPSSGEMIFLIYQGSYDQQNATEGRYSLNFQKARKSANLVISASQLGDSAMYFCAVVGGNTPLVFGKGTRLSVIANIQNPDPAVYQLRDSKSSDKSVCLFTDFDSQTNVSQSKDSDVYITDKTVLDMRSMDFKSNSAVAWSNKSDFACANAFNNSIIPEDTFFPSPESSCDVKLVEKSFETDTNLNFQNLSVIGFRILLLKVAGFNLLMTLRLWS

SEQ ID NO: 134 - protein, 313 aa, Homo sapiens
MGTSLLCWMALCLLGADHADTGVSQNPRHKITKRGQNVTFRCDPISEHNRLYWYRQTLGQGPEFLTYFQNEAQLEKSRLLSDRFSAERPKGSFSTLEIQRTEQGDSAMYLCASSPPGQGPYEQYFGPGTRLTVTEDLKNVFPPEVAVFEPSEAEISHTQKATLVCLATGFYPDHVELSWWVNGKEVHSGVSTDPQPLKEQPALNDSRYCLSSRLRVSATFWQNPRNHFRCQVQFYGLSENDEWTQDRAKPVTQIVSAEAWGRADCGFTSESYQQGVLSATILYEILLGKATLYAVLVSALVLMAMVKRKDSRG

SEQ ID NO: 135 - protein, 273 aa, Homo sapiens
MLLLLIPVLGMIFALRDARAQSVSQHNHHVILSEAASLELGCNYSYGGTVNLFWYVQYPGQHLQLLLKYFSGDPLVKGIKGFEAEFIKSKFSFNLRKPSVQWSDTAEYFCAVEKDNYGQNFVFGPGTRLSVLPYIQNPDPAVYQLRDSKSSDKSVCLFTDFDSQTNVSQSKDSDVYITDKTVLDMRSMDFKSNSAVAWSNKSDFACANAFNNSIIPEDTFFPSPESSCDVKLVEKSFETDTNLNFQNLSVIGFRILLLKVAGFNLLMTLRLWS

SEQ ID NO: 136 - protein, 312 aa, Homo sapiens
MGIRLLCRVAFCFLAVGLVDVKVTQSSRYLVKRTGEKVFLECVQDMDHENMFWYRQDPGLGLRLIYFSYDVKMKEKGDIPEGYSVSREKKERFSLILESASTNQTSMYLCASSSIPGTAYEQYFGPGTRLTVTEDLKNVFPPEVAVFEPSEAEISHTQKATLVCLATGFYPDHVELSWWVNGKEVHSGVSTDPQPLKEQPALNDSRYCLSSRLRVSATFWQNPRNHFRCQVQFYGLSENDEWTQDRAKPVTQIVSAEAWGRADCGFTSESYQQGVLSATILYEILLGKATLYAVLVSALVLMAMVKRKDSRG

SEQ ID NO: 137 - protein, 277 aa, Homo sapiens
MLLLLVPVLEVIFTLGGTRAQSVTQLDSHVSVSEGTPVLLRCNYSSSYSPSLFWYVQHPNKGLQLLLKYTSAATLVKGINGFEAEFKKSETSFHLTKPSAHMSDAAEYFCVVSDLRNYGGSQGNLIFGKGTKLSVKPNIQNPDPAVYQLRDSKSSDKSVCLFTDFDSQTNVSQSKDSDVYITDKTVLDMRSMDFKSNSAVAWSNKSDFACANAFNNSIIPEDTFFPSPESSCDVKLVEKSFETDTNLNFQNLSVIGFRILLLKVAGFNLLMTLRLWS

SEQ ID NO: 138 - protein, 311 aa, Homo sapiens
MGFRLLCCVAFCLLGAGPVDSGVTQTPKHLITATGQRVTLRCSPRSGDLSVYWYQQSLDQGLQFLIQYYNGEERAKGNILERFSAQQFPDLHSELNLSSLELGDSALYFCASSRGGPSYEQYFGPGTRLTVTEDLKNVFPPEVAVFEPSEAEISHTQKATLVCLATGFYPDHVELSWWVNGKEVHSGVSTDPQPLKEQPALNDSRYCLSSRLRVSATFWQNPRNHFRCQVQFYGLSENDEWTQDRAKPVTQIVSAEAWGRADCGFTSESYQQGVLSATILYEILLGKATLYAVLVSALVLMAMVKRKDSRG

SEQ ID NO: 139 - protein, 271 aa, Homo sapiens
MMKCPQALLAIFWLLLSWVSSEDKVVQSPLSLVVHEGDTVTLNCSYEVTNFRSLLWYKQEKKAPTFLFMLTSSGIEKKSGRLSSILDKKELSSILNITATQTGDSAIYLCAVETSGSRLTFGEGTQLTVNPDIQNPDPAVYQLRDSKSSDKSVCLFTDFDSQTNVSQSKDSDVYITDKTVLDMRSMDFKSNSAVAWSNKSDFACANAFNNSIIPEDTFFPSPESSCDVKLVEKSFETDTNLNFQNLSVIGFRILLLKVAGFNLLMTLRLWS

SEQ ID NO: 140 - protein, 307 aa, Homo sapiens
MLCSLLALLLGTFFGVRSQTIHQWPATLVQPVGSPLSLECTVEGTSNPNLYWYRQAAGRGLQLLFYSVGIGQISSEVPQNLSASRPQDRQFILSSKKLLLSDSGFYLCASSFSRRRHGYTFGSGTRLTVVEDLNKVFPPEVAVFEPSEAEISHTQKATLVCLATGFFPDHVELSWWVNGKEVHSGVSTDPQPLKEQPALNDSRYCLSSRLRVSATFWQNPRNHFRCQVQFYGLSENDEWTQDRAKPVTQIVSAEAWGRADCGFTSVSYQQGVLSATILYEILLGKATLYAVLVSALVLMAMVKRKDF

SEQ ID NO: 141 - protein, 270 aa, Homo sapiens
MLLITSMLVLWMQLSQVNGQQVMQIPQYQHVQEGEDFTTYCNSSTTLSNIQWYKQRPGGHPVFLIQLVKSGEVKKQKRLTFQFGEAKKNSSLHITATQTTDVGTYFCAGTLRGSQGNLIFGKGTKLSVKPNIQNPDPAVYQLRDSKSSDKSVCLFTDFDSQTNVSQSKDSDVYITDKTVLDMRSMDFKSNSAVAWSNKSDFACANAFNNSIIPEDTFFPSPESSCDVKLVEKSFETDTNLNFQNLSVIGFRILLLKVAGFNLLMTLRLWS

SEQ ID NO: 142 - protein, 310 aa, Homo sapiens
MGCRLLCCVVFCLLQAGPLDTAVSQTPKYLVTQMGNDKSIKCEQNLGHDTMYWYKQDSKKFLKIMFSYNNKELIINETVPNRFSPKSPDKAHLNLHINSLELGDSAVYFCASSQEGTHWGEAFFGQGTRLTVVEDLNKVFPPEVAVFEPSEAEISHTQKATLVCLATGFFPDHVELSWWVNGKEVHSGVSTDPQPLKEQPALNDSRYCLSSRLRVSATFWQNPRNHFRCQVQFYGLSENDEWTQDRAKPVTQIVSAEAWGRADCGFTSVSYQQGVLSATILYEILLGKATLYAVLVSALVLMAMVKRKDF

SEQ ID NO: 143 - protein, 276 aa, Homo sapiens
MSLSSLLKVVTASLWLGPGIAQKITQTQPGMFVQEKEAVTLDCTYDTSDPSYGLFWYKQPSSGEMIFLIYQGSYDQQNATEGRYSLNFQKARKSANLVISASQLGDSAMYFCAMREAPNRDDKIIFGKGTRLHILPNIQNPDPAVYQLRDSKSSDKSVCLFTDFDSQTNVSQSKDSDVYITDKTVLDMRSMDFKSNSAVAWSNKSDFACANAFNNSIIPEDTFFPSPESSCDVKLVEKSFETDTNLNFQNLSVIGFRILLLKVAGFNLLMTLRLWS

SEQ ID NO: 144 - protein, 306 aa, Homo sapiens
MLCSLLALLLGTFFGVRSQTIHQWPATLVQPVGSPLSLECTVEGTSNPNLYWYRQAAGRGLQLLFYSVGIGQISSEVPQNLSASRPQDRQFILSSKKLLLSDSGFYLCAGGQGRRYGYTFGSGTRLTVVEDLNKVFPPEVAVFEPSEAEISHTQKATLVCLATGFFPDHVELSWWVNGKEVHSGVSTDPQPLKEQPALNDSRYCLSSRLRVSATFWQNPRNHFRCQVQFYGLSENDEWTQDRAKPVTQIVSAEAWGRADCGFTSVSYQQGVLSATILYEILLGKATLYAVLVSALVLMAMVKRKDF

SEQ ID NO: 145 - protein, 271 aa, Homo sapiens
MKTFAGFSFLFLWLQLDCMSRGEDVEQSLFLSVREGDSSVINCTYTDSSSTYLYWYKQEPGAGLQLLTYIFSNMDMKQDQRLTVLLNKKDKHLSLRIADTQTGDSAIYFCAEIDGNNRLAFGKGNQVVVIPNIQNPDPAVYQLRDSKSSDKSVCLFTDFDSQTNVSQSKDSDVYITDKTVLDMRSMDFKSNSAVAWSNKSDFACANAFNNSIIPEDTFFPSPESSCDVKLVEKSFETDTNLNFQNLSVIGFRILLLKVAGFNLLMTLRLWS

SEQ ID NO: 146 - protein, 310 aa, Homo sapiens
MGSRLLCWVLLCLLGAGPVKAGVTQTPRYLIKTRGQQVTLSCSPISGHRSVSWYQQTPGQGLQFLFEYFSETQRNKGNFPGRFSGRQFSNSRSEMNVSTLELGDSALYLCASSLGSGREQYFGPGTRLTVTEDLKNVFPPEVAVFEPSEAEISHTQKATLVCLATGFYPDHVELSWWVNGKEVHSGVSTDPQPLKEQPALNDSRYCLSSRLRVSATFWQNPRNHFRCQVQFYGLSENDEWTQDRAKPVTQIVSAEAWGRADCGFTSESYQQGVLSATILYEILLGKATLYAVLVSALVLMAMVKRKDSRG

SEQ ID NO: 147 - protein, 273 aa, Homo sapiens
MTSIRAVFIFLWLQLDLVNGENVEQHPSTLSVQEGDSAVIKCTYSDSASNYFPWYKQELGKGPQLIIDIRSNVGEKKDQRIAVTLNKTAKHFSLHITETQPEDSAVYFCAASKTDGGYNKLIFGAGTRLAVHPYIQNPDPAVYQLRDSKSSDKSVCLFTDFDSQTNVSQSKDSDVYITDKTVLDMRSMDFKSNSAVAWSNKSDFACANAFNNSIIPEDTFFPSPESSCDVKLVEKSFETDTNLNFQNLSVIGFRILLLKVAGFNLLMTLRLWS

SEQ ID NO: 148 - protein, 311 aa, Homo sapiens
MGPQLLGYVVLCLLGAGPLEAQVTQNPRYLITVTGKKLTVTCSQNMNHEYMSWYRQDPGLGLRQIYYSMNVEVTDKGDVPEGYKVSRKEKRNFPLILESPSPNQTSLYFCASSGRAYQETQYFGPGTRLLVLEDLKNVFPPEVAVFEPSEAEISHTQKATLVCLATGFYPDHVELSWWVNGKEVHSGVSTDPQPLKEQPALNDSRYCLSSRLRVSATFWQNPRNHFRCQVQFYGLSENDEWTQDRAKPVTQIVSAEAWGRADCGFTSESYQQGVLSATILYEILLGKATLYAVLVSALVLMAMVKRKDSRG

SEQ ID NO: 149 - protein, 270 aa, Homo sapiens
MLLEHLLIILWMQLTWVSGQQLNQSPQSMFIQEGEDVSMNCTSSSIFNTWLWYKQEPGEGPVLLIALYKAGELTSNGRLTAQFGITRKDSFLNISASIPSDVGIYFCAGHRDNAGNMLTFGGGTRLMVKPHIQNPDPAVYQLRDSKSSDKSVCLFTDFDSQTNVSQSKDSDVYITDKTVLDMRSMDFKSNSAVAWSNKSDFACANAFNNSIIPEDTFFPSPESSCDVKLVEKSFETDTNLNFQNLSVIGFRILLLKVAGFNLLMTLRLWS

SEQ ID NO: 150 - protein, 308 aa, Homo sapiens
MGTRLFFYVALCLLWTGHMDAGITQSPRHKVTETGTPVTLRCHQTENHRYMYWYRQDPGHGLRLIHYSYGVKDTDKGEVSDGYSVSRSKTEDFLLTLESATSSQTSVYFCAISENPGQPQHFGDGTRLSILEDLNKVFPPEVAVFEPSEAEISHTQKATLVCLATGFFPDHVELSWWVNGKEVHSGVSTDPQPLKEQPALNDSRYCLSSRLRVSATFWQNPRNHFRCQVQFYGLSENDEWTQDRAKPVTQIVSAEAWGRADCGFTSVSYQQGVLSATILYEILLGKATLYAVLVSALVLMAMVKRKDF

SEQ ID NO: 151 - protein, 278 aa, Homo sapiens
MLTASLLRAVIASICVVSSMAQKVTQAQTEISVVEKEDVTLDCVYETRDTTYYLFWYKQPPSGELVFLIRRNSFDEQNEISGRYSWNFQKSTSSFNFTITASQVVDSAVYFCALSEAGTYNTDKLIFGTGTRLQVFPNIIQNPDPAVYQLRDSKSSDKSVCLFTDFDSQTNVSQSKDSDVYITDKTVLDMRSMDFKSNSAVAWSNKSDFACANAFNNSIIPEDTFFPSPESSCDVKLVEKSFETDTNLNFQNLSVIGFRILLLKVAGFNLLMTLRLWS

SEQ ID NO: 152 - protein, 321 aa, Homo sapiens
MLLLLLLLGPGISLLLPGSLAGSGLGAVVSQHPSWVICKSGTSVKIECRSLDFQATTMFWYRQFPKQSLMLMATSNEGSKATYEQGVEKDKFLINHASLTLSTLTVTSAHPEDSSFYICSAREGGGNSYEQYFGPGTRLTVTEDLKNVFPPEVAVFEPSEAEISHTQKATLVCLATGFYPDHVELSWWVNGKEVHSGVSTDPQPLKEQPALNDSRYCLSSRLRVSATFWQNPRNHFRCQVQFYGLSENDEWTQDRAKPVTQIVSAEAWGRADCGFTSESYQQGVLSATILYEILLGKATLYAVLVSALVLMAMVKRKDSRG

SEQ ID NO: 153 - protein, 276 aa, Homo sapiens
MMKCPQALLAIFWLLLSWVSSEDKVVQSPLSLVVHEGDTVTLNCSYEVTNFRSLLWYKQEKKAPTFLFMLTSSGIEKKSGRLSSILDKKELSSILNITATQTGDSAIYLCAVEANAGGTSYGKLTFGQGTILTVHPNIQNPDPAVYQLRDSKSSDKSVCLFTDFDSQTNVSQSKDSDVYITDKTVLDMRSMDFKSNSAVAWSNKSDFACANAFNNSIIPEDTFFPSPESSCDVKLVEKSFETDTNLNFQNLSVIGFRILLLKVAGFNLLMTLRLWS

SEQ ID NO: 154 - protein, 310 aa, Homo sapiens
MSIGLLCCAALSLLWAGPVNAGVTQTPKFQVLKTGQSMTLQCAQDMNHEYMSWYRQDPGMGLRLIHYSVGAGITDQGEVPNGYNVSRSTTEDFPLRLLSAAPSQTSVYFCASSYGRGYRYGYTFGSGTRLTVVEDLNKVFPPEVAVFEPSEAEISHTQKATLVCLATGFFPDHVELSWWVNGKEVHSGVSTDPQPLKEQPALNDSRYCLSSRLRVSATFWQNPRNHFRCQVQFYGLSENDEWTQDRAKPVTQIVSAEAWGRADCGFTSVSYQQGVLSATILYEILLGKATLYAVLVSALVLMAMVKRKDF

SEQ ID NO: 155 - protein, 270 aa, Homo sapiens
MWGVFLLYVSMKMGGTTGQNIDQPTEMTATEGAIVQINCTYQTSGFNGLFWYQQHAGEAPTFLSYNVLDGLEEKGRFSSFLSRSKGYSYLLLKELQMKDSASYLCAASRTDSWGKFQFEFGAGTQVVVTPDIQNPDPAVYQLRDSKSSDKSVCLFTDFDSQTNVSQSKDSDVYITDKTVLDMRSMDFKSNSAVAWSNKSDFACANAFNNSIIPEDTFFPSPESSCDVKLVEKSFETDTNLNFQNLSVIGFRILLLKVAGFNLLMTLRLWS

SEQ ID NO: 156 - protein, 312 aa, Homo sapiens
MGSWTLCCVSLCILVAKHTDAGVIQSPRHEVTEMGQEVTLRCKPISGHDYLFWYRQTMMRGLELLIYFNNNVPIDDSGMPEDRFSAKMPNASFSTLKIQPSEPRDSAVYFCASSFGGDRYEQYFGPGTRLTVTEDLKNVFPPEVAVFEPSEAEISHTQKATLVCLATGFYPDHVELSWWVNGKEVHSGVSTDPQPLKEQPALNDSRYCLSSRLRVSATFWQNPRNHFRCQVQFYGLSENDEWTQDRAKPVTQIVSAEAWGRADCGFTSESYQQGVLSATILYEILLGKATLYAVLVSALVLMAMVKRKDSRG

SEQ ID NO: 157 - protein, 272 aa, Homo sapiens
MLLLLVPVLEVIFTLGGTRAQSVTQLGSHVSVSEGALVLLRCNYSSSVPPYLFWYVQYPNQGLQLLLKYTSAATLVKGINGFEAEFKKSETSFHLTKPSAHMSDAAEYFCAVSGGSQGNLIFGKGTKLSVKPNIQNPDPAVYQLRDSKSSDKSVCLFTDFDSQTNVSQSKDSDVYITDKTVLDMRSMDFKSNSAVAWSNKSDFACANAFNNSIIPEDTFFPSPESSCDVKLVEKSFETDTNLNFQNLSVIGFRILLLKVAGFNLLMTLRLWS

SEQ ID NO: 158 - protein, 311 aa, Homo sapiens
MSNQVLCCVVLCFLGANTVDGGITQSPKYLFRKEGQNVTLSCEQNLNHDAMYWYRQDPGQGLRLIYYSQIVNDFQKGDIAEGYSVSREKKESFPLTVTSAQKNPTAFYLCASSTRDRVGREKLFFGSGTQLSVLEDLNKVFPPEVAVFEPSEAEISHTQKATLVCLATGFFPDHVELSWWVNGKEVHSGVSTDPQPLKEQPALNDSRYCLSSRLRVSATFWQNPRNHFRCQVQFYGLSENDEWTQDRAKPVTQIVSAEAWGRADCGFTSVSYQQGVLSATILYEILLGKATLYAVLVSALVLMAMVKRKDF

SEQ ID NO: 159 - protein, 274 aa, Homo sapiens
MKKHLTTFLVILWLYFYRGNGKNQVEQSPQSLIILEGKNCTLQCNYTVSPFSNLRWYKQDTGRGPVSLTIMTFSENTKSNGRYTATLDADTKQSSLHITASQLSDSASYICVVPNAGNNRKLIWGLGTSLAVNPNIQNPDPAVYQLRDSKSSDKSVCLFTDFDSQTNVSQSKDSDVYITDKTVLDMRSMDFKSNSAVAWSNKSDFACANAFNNSIIPEDTFFPSPESSCDVKLVEKSFETDTNLNFQNLSVIGFRILLLKVAGFNLLMTLRLWS

SEQ ID NO: 160 - protein, 309 aa, Homo sapiens
MSIGLLCCAALSLLWAGPVNAGVTQTPKFQVLKTGQSMTLQCAQDMNHEYMSWYRQDPGMGLRLIHYSVGAGITDQGEVPNGYNVSRSTTEDFPLRLLSAAPSQTSVYFCASSYSLETQYFGPGTRLLVLEDLKNVFPPEVAVFEPSEAEISHTQKATLVCLATGFYPDHVELSWWVNGKEVHSGVSTDPQPLKEQPALNDSRYCLSSRLRVSATFWQNPRNHFRCQVQFYGLSENDEWTQDRAKPVTQIVSAEAWGRADCGFTSESYQQGVLSATILYEILLGKATLYAVLVSALVLMAMVKRKDSRG

SEQ ID NO: 161 - protein, 273 aa, Homo sapiens
MACPGFLWALVISTCLEFSMAQTVTQSQPEMSVQEAETVTLSCTYDTSESDYYLFWYKQPPSRQMILVIRQEAYKQQNATENRFSVNFQKAAKSFSLKISDSQLGDAAMYFCAYGDSGYALNFGKGTSLLVTPHIQNPDPAVYQLRDSKSSDKSVCLFTDFDSQTNVSQSKDSDVYITDKTVLDMRSMDFKSNSAVAWSNKSDFACANAFNNSIIPEDTFFPSPESSCDVKLVEKSFETDTNLNFQNLSVIGFRILLLKVAGFNLLMTLRLWS

SEQ ID NO: 162 - protein, 313 aa, Homo sapiens
MGIRLLCRVAFCFLAVGLVDVKVTQSSRYLVKRTGEKVFLECVQDMDHENMFWYRQDPGLGLRLIYFSYDVKMKEKGDIPEGYSVSREKKERFSLILESASTNQTSMYLCATHRGRQQLSYEQYFGPGTRLTVTEDLKNVFPPEVAVFEPSEAEISHTQKATLVCLATGFYPDHVELSWWVNGKEVHSGVSTDPQPLKEQPALNDSRYCLSSRLRVSATFWQNPRNHFRCQVQFYGLSENDEWTQDRAKPVTQIVSAEAWGRADCGFTSESYQQGVLSATILYEILLGKATLYAVLVSALVLMAMVKRKDSRG

SEQ ID NO: 163 - protein, 276 aa, Homo sapiens
MACPGFLWALVISTCLEFSMAQTVTQSQPEMSVQEAETVTLSCTYDTSESDYYLFWYKQPPSRQMILVIRQEAYKQQNATENRFSVNFQKAAKSFSLKISDSQLGDAAMYFCASSLLMDSNYQLIWGAGTKLIIKPDIQNPDPAVYQLRDSKSSDKSVCLFTDFDSQTNVSQSKDSDVYITDKTVLDMRSMDFKSNSAVAWSNKSDFACANAFNNSIIPEDTFFPSPESSCDVKLVEKSFETDTNLNFQNLSVIGFRILLLKVAGFNLLMTLRLWS

SEQ ID NO: 164 - protein, 314 aa, Homo sapiens
MGTSLLCWMALCLLGADHADTGVSQNPRHKITKRGQNVTFRCDPISEHNRLYWYRQTLGQGPEFLTYFQNEAQLEKSRLLSDRFSAERPKGSFSTLEIQRTEQGDSAMYLCASSLPGQGFQETQYFGPGTRLLVLEDLKNVFPPEVAVFEPSEAEISHTQKATLVCLATGFYPDHVELSWWVNGKEVHSGVSTDPQPLKEQPALNDSRYCLSSRLRVSATFWQNPRNHFRCQVQFYGLSENDEWTQDRAKPVTQIVSAEAWGRADCGFTSESYQQGVLSATILYEILLGKATLYAVLVSALVLMAMVKRKDSRG

SEQ ID NO: 165 - protein, 269 aa, Homo sapiens
MKRILGALLGLLSAQVCCVRGIQVEQSPPDLILQEGANSTLRCNFSDSVNNLQWFHQNPWGQLINLFYIPSGTKQNGRLSATTVATERYSLLYISSSQTTDSGVYFCAVDSSNDYKLSFGAGTTVTVRANIQNPDPAVYQLRDSKSSDKSVCLFTDFDSQTNVSQSKDSDVYITDKTVLDMRSMDFKSNSAVAWSNKSDFACANAFNNSIIPEDTFFPSPESSCDVKLVEKSFETDTNLNFQNLSVIGFRILLLKVAGFNLLMTLRLWS

SEQ ID NO: 166 - protein, 310 aa, Homo sapiens
MGTRLLCWVVLGFLGTDHTGAGVSQSPRYKVAKRGQDVALRCDPISGHVSLFWYQQALGQGPEFLTYFQNEAQLDKSGLPSDRFFAERPEGSVSTLKIQRTQQEDSAVYLCASSAYGGEQYFGPGTRLTVTEDLKNVFPPEVAVFEPSEAEISHTQKATLVCLATGFYPDHVELSWWVNGKEVHSGVSTDPQPLKEQPALNDSRYCLSSRLRVSATFWQNPRNHFRCQVQFYGLSENDEWTQDRAKPVTQIVSAEAWGRADCGFTSESYQQGVLSATILYEILLGKATLYAVLVSALVLMAMVKRKDSRG

SEQ ID NO: 167 - protein, 274 aa, Homo sapiens
MLLLLIPVLGMIFALRDARAQSVSQHNHHVILSEAASLELGCNYSYGGTVNLFWYVQYPGQHLQLLLKYFSGDPLVKGIKGFEAEFIKSKFSFNLRKPSVQWSDTAEYFCAVRSPGGGADGLTFGKGTHLIIQPYIQNPDPAVYQLRDSKSSDKSVCLFTDFDSQTNVSQSKDSDVYITDKTVLDMRSMDFKSNSAVAWSNKSDFACANAFNNSIIPEDTFFPSPESSCDVKLVEKSFETDTNLNFQNLSVIGFRILLLKVAGFNLLMTLRLWS

SEQ ID NO: 168 - protein, 310 aa, Homo sapiens
MDSWTFCCVSLCILVAKHTDAGVIQSPRHEVTEMGQEVTLRCKPISGHNSLFWYRQTMMRGLELLIYFNNNVPIDDSGMPEDRFSAKMPNASFSTLKIQPSEPRDSAVYFCASSGQGSGGFFGPGTRLTVLEDLKNVFPPEVAVFEPSEAEISHTQKATLVCLATGFYPDHVELSWWVNGKEVHSGVSTDPQPLKEQPALNDSRYCLSSRLRVSATFWQNPRNHFRCQVQFYGLSENDEWTQDRAKPVTQIVSAEAWGRADCGFTSESYQQGVLSATILYEILLGKATLYAVLVSALVLMAMVKRKDSRG

SEQ ID NO: 169 - protein, 267 aa, Homo sapiens
MLLITSMLVLWMQLSQVNGQQVMQIPQYQHVQEGEDFTTYCNSSTTLSNIQWYKQRPGGHPVFLIQLVKSGEVKKQKRLTFQFGEAKKNSSLHITATQTTDVGTYFCAGPGDDKIIFGKGTRLHILPNIQNPDPAVYQLRDSKSSDKSVCLFTDFDSQTNVSQSKDSDVYITDKTVLDMRSMDFKSNSAVAWSNKSDFACANAFNNSIIPEDTFFPSPESSCDVKLVEKSFETDTNLNFQNLSVIGFRILLLKVAGFNLLMTLRLWS

SEQ ID NO: 170 - protein, 310 aa, Homo sapiens
MGSRLLCWVLLCLLGAGPVKAGVTQTPRYLIKTRGQQVTLSCSPISGHRSVSWYQQTPGQGLQFLFEYFSETQRNKGNFPGRFSGRQFSNSRSEMNVSTLELGDSALYLCASSSGTVSYTEAFFGQGTRLTVVEDLNKVFPPEVAVFEPSEAEISHTQKATLVCLATGFFPDHVELSWWVNGKEVHSGVSTDPQPLKEQPALNDSRYCLSSRLRVSATFWQNPRNHFRCQVQFYGLSENDEWTQDRAKPVTQIVSAEAWGRADCGFTSVSYQQGVLSATILYEILLGKATLYAVLVSALVLMAMVKRKDF

SEQ ID NO: 171 - protein, 269 aa, Homo sapiens
MKPTLISVLVIIFILRGTRAQRVTQPEKLLSVFKGAPVELKCNYSYSGSPELFWYVQYSRQRLQLLLRHISRESIKGFTADLNKGETSFHLKKPFAQEEDSAMYYCTFLGGSTLGRLYFGRGTQLTVWPDIQNPDPAVYQLRDSKSSDKSVCLFTDFDSQTNVSQSKDSDVYITDKTVLDMRSMDFKSNSAVAWSNKSDFACANAFNNSIIPEDTFFPSPESSCDVKLVEKSFETDTNLNFQNLSVIGFRILLLKVAGFNLLMTLRLWS

SEQ ID NO: 172 - protein, 274 aa, Homo sapiens
MLLELIPLLGIHFVLRTARAQSVTQPDIHITVSEGASLELRCNYSYGATPYLFWYVQSPGQGLQLLLKYFSGDTLVQGIKGFEAEFKRSQSSFNLRKPSVHWSDAAEYFCAVGRSGGSNYKLTFGKGTLLTVNPNIQNPDPAVYQLRDSKSSDKSVCLFTDFDSQTNVSQSKDSDVYITDKTVLDMRSMDFKSNSAVAWSNKSDFACANAFNNSIIPEDTFFPSPESSCDVKLVEKSFETDTNLNFQNLSVIGFRILLLKVAGFNLLMTLRLWS

SEQ ID NO: 173 - protein, 310 aa, Homo sapiens
MGFRLLCCVAFCLLGAGPVDSGVTQTPKHLITATGQRVTLRCSPRSGDLSVYWYQQSLDQGLQFLIQYYNGEERAKGNILERFSAQQFPDLHSELNLSSLELGDSALYFCASSVDGHEGEKLFFGSGTQLSVLEDLNKVFPPEVAVFEPSEAEISHTQKATLVCLATGFFPDHVELSWWVNGKEVHSGVSTDPQPLKEQPALNDSRYCLSSRLRVSATFWQNPRNHFRCQVQFYGLSENDEWTQDRAKPVTQIVSAEAWGRADCGFTSVSYQQGVLSATILYEILLGKATLYAVLVSALVLMAMVKRKDF

SEQ ID NO: 174 - protein, 272 aa, Homo sapiens
MACPGFLWALVISTCLEFSMAQTVTQSQPEMSVQEAETVTLSCTYDTSESDYYLFWYKQPPSRQMILVIRQEAYKQQNATENRFSVNFQKAAKSFSLKISDSQLGDAAMYFCAYYDNARLMFGDGTQLVVKPNIQNPDPAVYQLRDSKSSDKSVCLFTDFDSQTNVSQSKDSDVYITDKTVLDMRSMDFKSNSAVAWSNKSDFACANAFNNSIIPEDTFFPSPESSCDVKLVEKSFETDTNLNFQNLSVIGFRILLLKVAGFNLLMTLRLWS

SEQ ID NO: 175 - protein, 310 aa, Homo sapiens
MGFRLLCCVAFCLLGAGPVDSGVTQTPKHLITATGQRVTLRCSPRSGDLSVYWYQQSLDQGLQFLIQYYNGEERAKGNILERFSAQQFPDLHSELNLSSLELGDSALYFCASTAELTDTQYFGPGTRLTVLEDLKNVFPPEVAVFEPSEAEISHTQKATLVCLATGFYPDHVELSWWVNGKEVHSGVSTDPQPLKEQPALNDSRYCLSSRLRVSATFWQNPRNHFRCQVQFYGLSENDEWTQDRAKPVTQIVSAEAWGRADCGFTSESYQQGVLSATILYEILLGKATLYAVLVSALVLMAMVKRKDSRG

SEQ ID NO: 176 - protein, 277 aa, Homo sapiens
MAMLLGASVLILWLQPDWVNSQQKNDDQQVKQNSPSLSVQEGRISILNCDYTNSMFDYFLWYKKYPAEGPTFLISISSIKDKNEDGRFTVFLNKSAKHLSLHIVPSQPGDSAVYFCAATPGDDKIIFGKGTRLHILPNIQNPDPAVYQLRDSKSSDKSVCLFTDFDSQTNVSQSKDSDVYITDKTVLDMRSMDFKSNSAVAWSNKSDFACANAFNNSIIPEDTFFPSPESSCDVKLVEKSFETDTNLNFQNLSVIGFRILLLKVAGFNLLMTLRLWS

SEQ ID NO: 177 - protein, 319 aa, Homo sapiens
MLLLLLLLGPGISLLLPGSLAGSGLGAVVSQHPSWVICKSGTSVKIECRSLDFQATTMFWYRQFPKQSLMLMATSNEGSKATYEQGVEKDKFLINHASLTLSTLTVTSAHPEDSSFYICSARDLAGPNYGYTFGSGTRLTVVEDLNKVFPPEVAVFEPSEAEISHTQKATLVCLATGFFPDHVELSWWVNGKEVHSGVSTDPQPLKEQPALNDSRYCLSSRLRVSATFWQNPRNHFRCQVQFYGLSENDEWTQDRAKPVTQIVSAEAWGRADCGFTSVSYQQGVLSATILYEILLGKATLYAVLVSALVLMAMVKRKDF

SEQ ID NO: 178 - protein, 273 aa, Homo sapiens
MACPGFLWALVISTCLEFSMAQTVTQSQPEMSVQEAETVTLSCTYDTSESDYYLFWYKQPPSRQMILVIRQEAYKQQNATENRFSVNFQKAAKSFSLKISDSQLGDAAMYFCAYSDTDKLIFGTGTRLQVFPNIIQNPDPAVYQLRDSKSSDKSVCLFTDFDSQTNVSQSKDSDVYITDKTVLDMRSMDFKSNSAVAWSNKSDFACANAFNNSIIPEDTFFPSPESSCDVKLVEKSFETDTNLNFQNLSVIGFRILLLKVAGFNLLMTLRLWS

SEQ ID NO: 179 - protein, 309 aa, Homo sapiens
MSISLLCCAAFPLLWAGPVNAGVTQTPKFRILKIGQSMTLQCTQDMNHNYMYWYRQDPGMGLKLIYYSVGAGITDKGEVPNGYNVSRSTTEDFPLRLELAAPSQTSVYFCASLGQVSNTEAFFGQGTRLTVVEDLNKVFPPEVAVFEPSEAEISHTQKATLVCLATGFFPDHVELSWWVNGKEVHSGVSTDPQPLKEQPALNDSRYCLSSRLRVSATFWQNPRNHFRCQVQFYGLSENDEWTQDRAKPVTQIVSAEAWGRADCGFTSVSYQQGVLSATILYEILLGKATLYAVLVSALVLMAMVKRKDF

SEQ ID NO: 180 - protein, 268 aa, Homo sapiens
MWGVFLLYVSMKMGGTTGQNIDQPTEMTATEGAIVQINCTYQTSGFNGLFWYQQHAGEAPTFLSYNVLDGLEEKGRFSSFLSRSKGYSYLLLKELQMKDSASYLCAVREVGTASKLTFGTGTRLQVTLDIQNPDPAVYQLRDSKSSDKSVCLFTDFDSQTNVSQSKDSDVYITDKTVLDMRSMDFKSNSAVAWSNKSDFACANAFNNSIIPEDTFFPSPESSCDVKLVEKSFETDTNLNFQNLSVIGFRILLLKVAGFNLLMTLRLWS

SEQ ID NO: 181 - protein, 309 aa, Homo sapiens
MGTSLLCWMALCLLGADHADTGVSQNPRHKITKRGQNVTFRCDPISEHNRLYWYRQTLGQGPEFLTYFQNEAQLEKSRLLSDRFSAERPKGSFSTLEIQRTEQGDSAMYLCASSFNNEQFFGPGTRLTVLEDLKNVFPPEVAVFEPSEAEISHTQKATLVCLATGFYPDHVELSWWVNGKEVHSGVSTDPQPLKEQPALNDSRYCLSSRLRVSATFWQNPRNHFRCQVQFYGLSENDEWTQDRAKPVTQIVSAEAWGRADCGFTSESYQQGVLSATILYEILLGKATLYAVLVSALVLMAMVKRKDSRG

SEQ ID NO: 182 - protein, 269 aa, Homo sapiens
MTSIRAVFIFLWLQLDLVNGENVEQHPSTLSVQEGDSAVIKCTYSDSASNYFPWYKQELGKGPQLIIDIRSNVGEKKDQRIAVTLNKTAKHFSLHITETQPEDSAVYFCAASITDKIIFGKGTRLHILPNIQNPDPAVYQLRDSKSSDKSVCLFTDFDSQTNVSQSKDSDVYITDKTVLDMRSMDFKSNSAVAWSNKSDFACANAFNNSIIPEDTFFPSPESSCDVKLVEKSFETDTNLNFQNLSVIGFRILLLKVAGFNLLMTLRLWS

SEQ ID NO: 183 - protein, 309 aa, Homo sapiens
MGPGLLCWVLLCLLGAGPVDAGVTQSPTHLIKTRGQQVTLRCSPISGHKSVSWYQQVLGQGPQFIFQYYEKEERGRGNFPDRFSARQFPNYSSELNVNALLLGDSALYLCASSPEQGYQPQHFGDGTRLSILEDLNKVFPPEVAVFEPSEAEISHTQKATLVCLATGFFPDHVELSWWVNGKEVHSGVSTDPQPLKEQPALNDSRYCLSSRLRVSATFWQNPRNHFRCQVQFYGLSENDEWTQDRAKPVTQIVSAEAWGRADCGFTSVSYQQGVLSATILYEILLGKATLYAVLVSALVLMAMVKRKDF

SEQ ID NO: 184 - protein, 275 aa, Homo sapiens
MLLLLVPAFQVIFTLGGTRAQSVTQLDSQVPVFEEAPVELRCNYSSSVSVYLFWYVQYPNQGLQLLLKYLSGSTLVESINGFEAEFNKSQTSFHLRKPSVHISDTAEYFCAVSGISSGGYNKLIFGAGTRLAVHPYIQNPDPAVYQLRDSKSSDKSVCLFTDFDSQTNVSQSKDSDVYITDKTVLDMRSMDFKSNSAVAWSNKSDFACANAFNNSIIPEDTFFPSPESSCDVKLVEKSFETDTNLNFQNLSVIGFRILLLKVAGFNLLMTLRLWS

SEQ ID NO: 185 - protein, 313 aa, Homo sapiens
MGCRLLCCAVLCLLGAVPIDTEVTQTPKHLVMGMTNKKSLKCEQHMGHRAMYWYKQKAKKPPELMFVYSYEKLSINESVPSRFSPECPNSSLLNLHLHALQPEDSALYLCASSQGTSGSQETQYFGPGTRLLVLEDLKNVFPPEVAVFEPSEAEISHTQKATLVCLATGFYPDHVELSWWVNGKEVHSGVSTDPQPLKEQPALNDSRYCLSSRLRVSATFWQNPRNHFRCQVQFYGLSENDEWTQDRAKPVTQIVSAEAWGRADCGFTSESYQQGVLSATILYEILLGKATLYAVLVSALVLMAMVKRKDSRG

SEQ ID NO: 186 - protein, 276 aa, Homo sapiens
MTRVSLLWAVVVSTCLESGMAQTVTQSQPEMSVQEAETVTLSCTYDTSENNYYLFWYKQPPSRQMILVIRQEAYKQQNATENRFSVNFQKAAKSFSLKISDSQLGDTAMYFCAFMKTSGTYKYIFGTGTRLKVLANIIQNPDPAVYQLRDSKSSDKSVCLFTDFDSQTNVSQSKDSDVYITDKTVLDMRSMDFKSNSAVAWSNKSDFACANAFNNSIIPEDTFFPSPESSCDVKLVEKSFETDTNLNFQNLSVIGFRILLLKVAGFNLLMTLRLWS

SEQ ID NO: 187 - protein, 313 aa, Homo sapiens
MGFRLLCCVAFCLLGAGPVDSGVTQTPKHLITATGQRVTLRCSPRSGDLSVYWYQQSLDQGLQFLIQYYNGEERAKGNILERFSAQQFPDLHSELNLSSLELGDSALYFCASSPPTGRAYNEQFFGPGTRLTVLEDLKNVFPPEVAVFEPSEAEISHTQKATLVCLATGFYPDHVELSWWVNGKEVHSGVSTDPQPLKEQPALNDSRYCLSSRLRVSATFWQNPRNHFRCQVQFYGLSENDEWTQDRAKPVTQIVSAEAWGRADCGFTSESYQQGVLSATILYEILLGKATLYAVLVSALVLMAMVKRKDSRG

SEQ ID NO: 188 - protein, 270 aa, Homo sapiens
MKTFAGFSFLFLWLQLDCMSRGEDVEQSLFLSVREGDSSVINCTYTDSSSTYLYWYKQEPGAGLQLLTYIFSNMDMKQDQRLTVLLNKKDKHLSLRIADTQTGDSAIYFCAEARDDKIIFGKGTRLHILPNIQNPDPAVYQLRDSKSSDKSVCLFTDFDSQTNVSQSKDSDVYITDKTVLDMRSMDFKSNSAVAWSNKSDFACANAFNNSIIPEDTFFPSPESSCDVKLVEKSFETDTNLNFQNLSVIGFRILLLKVAGFNLLMTLRLWS

SEQ ID NO: 189 - protein, 320 aa, Homo sapiens
MLLLLLLLGPGISLLLPGSLAGSGLGAVVSQHPSWVICKSGTSVKIECRSLDFQATTMFWYRQFPKQSLMLMATSNEGSKATYEQGVEKDKFLINHASLTLSTLTVTSAHPEDSSFYICSARHIISSSGNTIYFGEGSWLTVVEDLNKVFPPEVAVFEPSEAEISHTQKATLVCLATGFFPDHVELSWWVNGKEVHSGVSTDPQPLKEQPALNDSRYCLSSRLRVSATFWQNPRNHFRCQVQFYGLSENDEWTQDRAKPVTQIVSAEAWGRADCGFTSVSYQQGVLSATILYEILLGKATLYAVLVSALVLMAMVKRKDF

SEQ ID NO: 190 - protein, 278 aa, Homo sapiens
MAMLLGASVLILWLQPDWVNSQQKNDDQQVKQNSPSLSVQEGRISILNCDYTNSMFDYFLWYKKYPAEGPTFLISISSIKDKNEDGRFTVFLNKSAKHLSLHIVPSQPGDSAVYFCAASANYGQNFVFGPGTRLSVLPYIQNPDPAVYQLRDSKSSDKSVCLFTDFDSQTNVSQSKDSDVYITDKTVLDMRSMDFKSNSAVAWSNKSDFACANAFNNSIIPEDTFFPSPESSCDVKLVEKSFETDTNLNFQNLSVIGFRILLLKVAGFNLLMTLRLWS

SEQ ID NO: 191 - protein, 307 aa, Homo sapiens
MSNQVLCCVVLCFLGANTVDGGITQSPKYLFRKEGQNVTLSCEQNLNHDAMYWYRQDPGQGLRLIYYSQIVNDFQKGDIAEGYSVSREKKESFPLTVTSAQKNPTAFYLCASSIGIERYTFGSGTRLTVVEDLNKVFPPEVAVFEPSEAEISHTQKATLVCLATGFFPDHVELSWWVNGKEVHSGVSTDPQPLKEQPALNDSRYCLSSRLRVSATFWQNPRNHFRCQVQFYGLSENDEWTQDRAKPVTQIVSAEAWGRADCGFTSVSYQQGVLSATILYEILLGKATLYAVLVSALVLMAMVKRKDF

SEQ ID NO: 192 - protein, 276 aa, Homo sapiens
MAMLLGASVLILWLQPDWVNSQQKNDDQQVKQNSPSLSVQEGRISILNCDYTNSMFDYFLWYKKYPAEGPTFLISISSIKDKNEDGRFTVFLNKSAKHLSLHIVPSQPGDSAVYFCAASPDARLMFGDGTQLVVKPNIQNPDPAVYQLRDSKSSDKSVCLFTDFDSQTNVSQSKDSDVYITDKTVLDMRSMDFKSNSAVAWSNKSDFACANAFNNSIIPEDTFFPSPESSCDVKLVEKSFETDTNLNFQNLSVIGFRILLLKVAGFNLLMTLRLWS

SEQ ID NO: 193 - protein, 304 aa, Homo sapiens
MLCSLLALLLGTFFGVRSQTIHQWPATLVQPVGSPLSLECTVEGTSNPNLYWYRQAAGRGLQLLFYSVGIGQISSEVPQNLSASRPQDRQFILSSKKLLLSDSGFYLCAWGQGRGYTFGSGTRLTVVEDLNKVFPPEVAVFEPSEAEISHTQKATLVCLATGFFPDHVELSWWVNGKEVHSGVSTDPQPLKEQPALNDSRYCLSSRLRVSATFWQNPRNHFRCQVQFYGLSENDEWTQDRAKPVTQIVSAEAWGRADCGFTSVSYQQGVLSATILYEILLGKATLYAVLVSALVLMAMVKRKDF

SEQ ID NO: 194 - protein, 272 aa, Homo sapiens
MACPGFLWALVISTCLEFSMAQTVTQSQPEMSVQEAETVTLSCTYDTSESDYYLFWYKQPPSRQMILVIRQEAYKQQNATENRFSVNFQKAAKSFSLKISDSQLGDAAMYFCAYGASNMLTFGGGTRLMVKPHIQNPDPAVYQLRDSKSSDKSVCLFTDFDSQTNVSQSKDSDVYITDKTVLDMRSMDFKSNSAVAWSNKSDFACANAFNNSIIPEDTFFPSPESSCDVKLVEKSFETDTNLNFQNLSVIGFRILLLKVAGFNLLMTLRLWS

SEQ ID NO: 195 - protein, 313 aa, Homo sapiens
MSISLLCCAAFPLLWAGPVNAGVTQTPKFRILKIGQSMTLQCTQDMNHNYMYWYRQDPGMGLKLIYYSVGAGITDKGEVPNGYNVSRSTTEDFPLRLELAAPSQTSVYFCASSTGLVSNTGELFFGEGSRLTVLEDLKNVFPPEVAVFEPSEAEISHTQKATLVCLATGFYPDHVELSWWVNGKEVHSGVSTDPQPLKEQPALNDSRYCLSSRLRVSATFWQNPRNHFRCQVQFYGLSENDEWTQDRAKPVTQIVSAEAWGRADCGFTSESYQQGVLSATILYEILLGKATLYAVLVSALVLMAMVKRKDSRG

SEQ ID NO: 196 - protein, 273 aa, Homo sapiens
METLLGVSLVILWLQLARVNSQQGEEDPQALSIQEGENATMNCSYKTSINNLQWYRQNSGRGLVHLILIRSNEREKHSGRLRVTLDTSKKSSSLLITASRAADTASYFCATVPWGGGFKTIFGAGTRLFVKANIIQNPDPAVYQLRDSKSSDKSVCLFTDFDSQTNVSQSKDSDVYITDKTVLDMRSMDFKSNSAVAWSNKSDFACANAFNNSIIPEDTFFPSPESSCDVKLVEKSFETDTNLNFQNLSVIGFRILLLKVAGFNLLMTLRLWS

SEQ ID NO: 197 - protein, 311 aa, Homo sapiens
MGSRLLCWVLLCLLGAGPVKAGVTQTPRYLIKTRGQQVTLSCSPISGHRSVSWYQQTPGQGLQFLFEYFSETQRNKGNFPGRFSGRQFSNSRSEMNVSTLELGDSALYLCASSPGTLSGNTEAFFGQGTRLTVVEDLNKVFPPEVAVFEPSEAEISHTQKATLVCLATGFFPDHVELSWWVNGKEVHSGVSTDPQPLKEQPALNDSRYCLSSRLRVSATFWQNPRNHFRCQVQFYGLSENDEWTQDRAKPVTQIVSAEAWGRADCGFTSVSYQQGVLSATILYEILLGKATLYAVLVSALVLMAMVKRKDF

SEQ ID NO: 198 - protein, 272 aa, Homo sapiens
MACPGFLWALVISTCLEFSMAQTVTQSQPEMSVQEAETVTLSCTYDTSESDYYLFWYKQPPSRQMILVIRQEAYKQQNATENRFSVNFQKAAKSFSLKISDSQLGDAAMYFCAYLEDARLMFGDGTQLVVKPNIQNPDPAVYQLRDSKSSDKSVCLFTDFDSQTNVSQSKDSDVYITDKTVLDMRSMDFKSNSAVAWSNKSDFACANAFNNSIIPEDTFFPSPESSCDVKLVEKSFETDTNLNFQNLSVIGFRILLLKVAGFNLLMTLRLWS

SEQ ID NO: 199 - protein, 310 aa, Homo sapiens
MGFRLLCCVAFCLLGAGPVDSGVTQTPKHLITATGQRVTLRCSPRSGDLSVYWYQQSLDQGLQFLIQYYNGEERAKGNILERFSAQQFPDLHSELNLSSLELGDSALYFCASNAGQGNIQYFGAGTRLSVLEDLKNVFPPEVAVFEPSEAEISHTQKATLVCLATGFYPDHVELSWWVNGKEVHSGVSTDPQPLKEQPALNDSRYCLSSRLRVSATFWQNPRNHFRCQVQFYGLSENDEWTQDRAKPVTQIVSAEAWGRADCGFTSESYQQGVLSATILYEILLGKATLYAVLVSALVLMAMVKRKDSRG

SEQ ID NO: 200 - protein, 271 aa, Homo sapiens
MACPGFLWALVISTCLEFSMAQTVTQSQPEMSVQEAETVTLSCTYDTSESDYYLFWYKQPPSRQMILVIRQEAYKQQNATENRFSVNFQKAAKSFSLKISDSQLGDAAMYFCAYLGNQFYFGTGTSLTVIPNIQNPDPAVYQLRDSKSSDKSVCLFTDFDSQTNVSQSKDSDVYITDKTVLDMRSMDFKSNSAVAWSNKSDFACANAFNNSIIPEDTFFPSPESSCDVKLVEKSFETDTNLNFQNLSVIGFRILLLKVAGFNLLMTLRLWS

SEQ ID NO: 201 - protein, 320 aa, Homo sapiens
MLLLLLLLGPGISLLLPGSLAGSGLGAVVSQHPSWVICKSGTSVKIECRSLDFQATTMFWYRQFPKQSLMLMATSNEGSKATYEQGVEKDKFLINHASLTLSTLTVTSAHPEDSSFYICSATGTTITDTQYFGPGTRLTVLEDLKNVFPPEVAVFEPSEAEISHTQKATLVCLATGFYPDHVELSWWVNGKEVHSGVSTDPQPLKEQPALNDSRYCLSSRLRVSATFWQNPRNHFRCQVQFYGLSENDEWTQDRAKPVTQIVSAEAWGRADCGFTSESYQQGVLSATILYEILLGKATLYAVLVSALVLMAMVKRKDSRG

SEQ ID NO: 202 - protein, 271 aa, Homo sapiens
MACPGFLWALVISTCLEFSMAQTVTQSQPEMSVQEAETVTLSCTYDTSESDYYLFWYKQPPSRQMILVIRQEAYKQQNATENRFSVNFQKAAKSFSLKISDSQLGDAAMYFCAYKEDQFYFGTGTSLTVIPNIQNPDPAVYQLRDSKSSDKSVCLFTDFDSQTNVSQSKDSDVYITDKTVLDMRSMDFKSNSAVAWSNKSDFACANAFNNSIIPEDTFFPSPESSCDVKLVEKSFETDTNLNFQNLSVIGFRILLLKVAGFNLLMTLRLWS

SEQ ID NO: 203 - protein, 309 aa, Homo sapiens
MGFRLLCCVAFCLLGAGPVDSGVTQTPKHLITATGQRVTLRCSPRSGDLSVYWYQQSLDQGLQFLIQYYNGEERAKGNILERFSAQQFPDLHSELNLSSLELGDSALYFCASSAGQAGTEAFFGQGTRLTVVEDLNKVFPPEVAVFEPSEAEISHTQKATLVCLATGFFPDHVELSWWVNGKEVHSGVSTDPQPLKEQPALNDSRYCLSSRLRVSATFWQNPRNHFRCQVQFYGLSENDEWTQDRAKPVTQIVSAEAWGRADCGFTSVSYQQGVLSATILYEILLGKATLYAVLVSALVLMAMVKRKDF

SEQ ID NO: 204 - protein, 279 aa, Homo sapiens
MAMLLGASVLILWLQPDWVNSQQKNDDQQVKQNSPSLSVQEGRISILNCDYTNSMFDYFLWYKKYPAEGPTFLISISSIKDKNEDGRFTVFLNKSAKHLSLHIVPSQPGDSAVYFCAASEDNAGNMLTFGGGTRLMVKPHIQNPDPAVYQLRDSKSSDKSVCLFTDFDSQTNVSQSKDSDVYITDKTVLDMRSMDFKSNSAVAWSNKSDFACANAFNNSIIPEDTFFPSPESSCDVKLVEKSFETDTNLNFQNLSVIGFRILLLKVAGFNLLMTLRLWS

SEQ ID NO: 205 - protein, 310 aa, Homo sapiens
MDTRVLCCAVICLLGAGLSNAGVMQNPRHLVRRRGQEARLRCSPMKGHSHVYWYRQLPEEGLKFMVYLQKENIIDESGMPKERFSAEFPKEGPSILRIQQVVRGDSAAYFCASSQQDSLYGYTFGSGTRLTVVEDLNKVFPPEVAVFEPSEAEISHTQKATLVCLATGFFPDHVELSWWVNGKEVHSGVSTDPQPLKEQPALNDSRYCLSSRLRVSATFWQNPRNHFRCQVQFYGLSENDEWTQDRAKPVTQIVSAEAWGRADCGFTSVSYQQGVLSATILYEILLGKATLYAVLVSALVLMAMVKRKDF

SEQ ID NO: 206 - protein, 270 aa, Homo sapiens
MLLEHLLIILWMQLTWVSGQQLNQSPQSMFIQEGEDVSMNCTSSSIFNTWLWYKQEPGEGPVLLIALYKAGELTSNGRLTAQFGITRKDSFLNISASIPSDVGIYFCAGQSPEGGNQFYFGTGTSLTVIPNIQNPDPAVYQLRDSKSSDKSVCLFTDFDSQTNVSQSKDSDVYITDKTVLDMRSMDFKSNSAVAWSNKSDFACANAFNNSIIPEDTFFPSPESSCDVKLVEKSFETDTNLNFQNLSVIGFRILLLKVAGFNLLMTLRLWS

SEQ ID NO: 207 - protein, 309 aa, Homo sapiens
MDSWTFCCVSLCILVAKHTDAGVIQSPRHEVTEMGQEVTLRCKPISGHNSLFWYRQTMMRGLELLIYFNNNVPIDDSGMPEDRFSAKMPNASFSTLKIQPSEPRDSAVYFCASSSPGELFFGEGSRLTVLEDLKNVFPPEVAVFEPSEAEISHTQKATLVCLATGFYPDHVELSWWVNGKEVHSGVSTDPQPLKEQPALNDSRYCLSSRLRVSATFWQNPRNHFRCQVQFYGLSENDEWTQDRAKPVTQIVSAEAWGRADCGFTSESYQQGVLSATILYEILLGKATLYAVLVSALVLMAMVKRKDSRG

SEQ ID NO: 208 - protein, 271 aa, Homo sapiens
MACPGFLWALVISTCLEFSMAQTVTQSQPEMSVQEAETVTLSCTYDTSESDYYLFWYKQPPSRQMILVIRQEAYKQQNATENRFSVNFQKAAKSFSLKISDSQLGDAAMYFCAYYDNDMRFGAGTRLTVKPNIQNPDPAVYQLRDSKSSDKSVCLFTDFDSQTNVSQSKDSDVYITDKTVLDMRSMDFKSNSAVAWSNKSDFACANAFNNSIIPEDTFFPSPESSCDVKLVEKSFETDTNLNFQNLSVIGFRILLLKVAGFNLLMTLRLWS

SEQ ID NO: 209 - protein, 310 aa, Homo sapiens
MGFRLLCCVAFCLLGAGPVDSGVTQTPKHLITATGQRVTLRCSPRSGDLSVYWYQQSLDQGLQFLIQYYNGEERAKGNILERFSAQQFPDLHSELNLSSLELGDSALYFCASSDGQAGQSGYTFGSGTRLTVVEDLNKVFPPEVAVFEPSEAEISHTQKATLVCLATGFFPDHVELSWWVNGKEVHSGVSTDPQPLKEQPALNDSRYCLSSRLRVSATFWQNPRNHFRCQVQFYGLSENDEWTQDRAKPVTQIVSAEAWGRADCGFTSVSYQQGVLSATILYEILLGKATLYAVLVSALVLMAMVKRKDF

SEQ ID NO: 210 - protein, 273 aa, Homo sapiens
MVKIRQFLLAILWLQLSCVSAAKNEVEQSPQNLTAQEGEFITINCSYSVGISALHWLQQHPGGGIVSLFMLSSGKKKHGRLIATINIQEKHSSLHITASHPRDSAVYICAVRSEETSGSRLTFGEGTQLTVNPDIQNPDPAVYQLRDSKSSDKSVCLFTDFDSQTNVSQSKDSDVYITDKTVLDMRSMDFKSNSAVAWSNKSDFACANAFNNSIIPEDTFFPSPESSCDVKLVEKSFETDTNLNFQNLSVIGFRILLLKVAGFNLLMTLRLWS

SEQ ID NO: 211 - protein, 312 aa, Homo sapiens
MDTWLVCWAIFSLLKAGLTEPEVTQTPSHQVTQMGQEVILRCVPISNHLYFYWYRQILGQKVEFLVSFYNNEISEKSEIFDDQFSVERPDGSNFTLKIRSTKLEDSAMYFCASSGEQDFSGTEAFFGQGTRLTVVEDLNKVFPPEVAVFEPSEAEISHTQKATLVCLATGFFPDHVELSWWVNGKEVHSGVSTDPQPLKEQPALNDSRYCLSSRLRVSATFWQNPRNHFRCQVQFYGLSENDEWTQDRAKPVTQIVSAEAWGRADCGFTSVSYQQGVLSATILYEILLGKATLYAVLVSALVLMAMVKRKDF

SEQ ID NO: 212 - protein, 271 aa, Homo sapiens
MACPGFLWALVISTCLEFSMAQTVTQSQPEMSVQEAETVTLSCTYDTSESDYYLFWYKQPPSRQMILVIRQEAYKQQNATENRFSVNFQKAAKSFSLKISDSQLGDAAMYFCAYREDQLTFGQGTILTVHPNIQNPDPAVYQLRDSKSSDKSVCLFTDFDSQTNVSQSKDSDVYITDKTVLDMRSMDFKSNSAVAWSNKSDFACANAFNNSIIPEDTFFPSPESSCDVKLVEKSFETDTNLNFQNLSVIGFRILLLKVAGFNLLMTLRLWS

SEQ ID NO: 213 - protein, 313 aa, Homo sapiens
MSIGLLCCAALSLLWAGPVNAGVTQTPKFQVLKTGQSMTLQCAQDMNHEYMSWYRQDPGMGLRLIHYSVGAGITDQGEVPNGYNVSRSTTEDFPLRLLSAAPSQTSVYFCASSRTSGTSYNEQFFGPGTRLTVLEDLKNVFPPEVAVFEPSEAEISHTQKATLVCLATGFYPDHVELSWWVNGKEVHSGVSTDPQPLKEQPALNDSRYCLSSRLRVSATFWQNPRNHFRCQVQFYGLSENDEWTQDRAKPVTQIVSAEAWGRADCGFTSESYQQGVLSATILYEILLGKATLYAVLVSALVLMAMVKRKDSRG

SEQ ID NO: 214 - protein, 272 aa, Homo sapiens
MACPGFLWALVISTCLEFSMAQTVTQSQPEMSVQEAETVTLSCTYDTSESDYYLFWYKQPPSRQMILVIRQEAYKQQNATENRFSVNFQKAAKSFSLKISDSQLGDAAMYFCAYNAGNMLTFGGGTRLMVKPHIQNPDPAVYQLRDSKSSDKSVCLFTDFDSQTNVSQSKDSDVYITDKTVLDMRSMDFKSNSAVAWSNKSDFACANAFNNSIIPEDTFFPSPESSCDVKLVEKSFETDTNLNFQNLSVIGFRILLLKVAGFNLLMTLRLWS

SEQ ID NO: 215 - protein, 309 aa, Homo sapiens
MSISLLCCAAFPLLWAGPVNAGVTQTPKFRILKIGQSMTLQCTQDMNHNYMYWYRQDPGMGLKLIYYSVGAGITDKGEVPNGYNVSRSTTEDFPLRLELAAPSQTSVYFCASRQDSLFTGAFFGQGTRLTVVEDLNKVFPPEVAVFEPSEAEISHTQKATLVCLATGFFPDHVELSWWVNGKEVHSGVSTDPQPLKEQPALNDSRYCLSSRLRVSATFWQNPRNHFRCQVQFYGLSENDEWTQDRAKPVTQIVSAEAWGRADCGFTSVSYQQGVLSATILYEILLGKATLYAVLVSALVLMAMVKRKDF

SEQ ID NO: 216 - protein, 274 aa, Homo sapiens
MTRVSLLWAVVVSTCLESGMAQTVTQSQPEMSVQEAETVTLSCTYDTSENNYYLFWYKQPPSRQMILVIRQEAYKQQNATENRFSVNFQKAAKSFSLKISDSQLGDTAMYFCALPGAGSYQLTFGKGTKLSVIPNIQNPDPAVYQLRDSKSSDKSVCLFTDFDSQTNVSQSKDSDVYITDKTVLDMRSMDFKSNSAVAWSNKSDFACANAFNNSIIPEDTFFPSPESSCDVKLVEKSFETDTNLNFQNLSVIGFRILLLKVAGFNLLMTLRLWS

SEQ ID NO: 217 - protein, 311 aa, Homo sapiens
MSLGLLCCGAFSLLWAGPVNAGVTQTPKFRVLKTGQSMTLLCAQDMNHEYMYWYRQDPGMGLRLIHYSVGEGTTAKGEVPDGYNVSRLKKQNFLLGLESAAPSQTSVYFCASSYGALQETQYFGPGTRLLVLEDLKNVFPPEVAVFEPSEAEISHTQKATLVCLATGFYPDHVELSWWVNGKEVHSGVSTDPQPLKEQPALNDSRYCLSSRLRVSATFWQNPRNHFRCQVQFYGLSENDEWTQDRAKPVTQIVSAEAWGRADCGFTSESYQQGVLSATILYEILLGKATLYAVLVSALVLMAMVKRKDSRG

SEQ ID NO: 218 - protein, 275 aa, Homo sapiens
MASAPISMLAMLFTLSGLRAQSVAQPEDQVNVAEGNPLTVKCTYSVSGNPYLFWYVQYPNRGLQFLLKYITGDNLVKGSYGFEAEFNKSQTSFHLKKPSALVSDSALYFCAVSDPKWDSNYQLIWGAGTKLIIKPDIQNPDPAVYQLRDSKSSDKSVCLFTDFDSQTNVSQSKDSDVYITDKTVLDMRSMDFKSNSAVAWSNKSDFACANAFNNSIIPEDTFFPSPESSCDVKLVEKSFETDTNLNFQNLSVIGFRILLLKVAGFNLLMTLRLWS

SEQ ID NO: 219 - protein, 321 aa, Homo sapiens
MLLLLLLLGPGISLLLPGSLAGSGLGAVVSQHPSWVICKSGTSVKIECRSLDFQATTMFWYRQFPKQSLMLMATSNEGSKATYEQGVEKDKFLINHASLTLSTLTVTSAHPEDSSFYICSAPSPVVSYNEQFFGPGTRLTVLEDLKNVFPPEVAVFEPSEAEISHTQKATLVCLATGFYPDHVELSWWVNGKEVHSGVSTDPQPLKEQPALNDSRYCLSSRLRVSATFWQNPRNHFRCQVQFYGLSENDEWTQDRAKPVTQIVSAEAWGRADCGFTSESYQQGVLSATILYEILLGKATLYAVLVSALVLMAMVKRKDSRG

SEQ ID NO: 220 - protein, 270 aa, Homo sapiens
MLLEHLLIILWMQLTWVSGQQLNQSPQSMFIQEGEDVSMNCTSSSIFNTWLWYKQEPGEGPVLLIALYKAGELTSNGRLTAQFGITRKDSFLNISASIPSDVGIYFCAGQGDNYGQNFVFGPGTRLSVLPYIQNPDPAVYQLRDSKSSDKSVCLFTDFDSQTNVSQSKDSDVYITDKTVLDMRSMDFKSNSAVAWSNKSDFACANAFNNSIIPEDTFFPSPESSCDVKLVEKSFETDTNLNFQNLSVIGFRILLLKVAGFNLLMTLRLWS

SEQ ID NO: 221 - protein, 319 aa, Homo sapiens
MLLLLLLLGPGISLLLPGSLAGSGLGAVVSQHPSWVICKSGTSVKIECRSLDFQATTMFWYRQFPKQSLMLMATSNEGSKATYEQGVEKDKFLINHASLTLSTLTVTSAHPEDSSFYICSARDRIASFSPLHFGNGTRLTVTEDLNKVFPPEVAVFEPSEAEISHTQKATLVCLATGFFPDHVELSWWVNGKEVHSGVSTDPQPLKEQPALNDSRYCLSSRLRVSATFWQNPRNHFRCQVQFYGLSENDEWTQDRAKPVTQIVSAEAWGRADCGFTSVSYQQGVLSATILYEILLGKATLYAVLVSALVLMAMVKRKDF

SEQ ID NO: 222 - protein, 272 aa, Homo sapiens
MACPGFLWALVISTCLEFSMAQTVTQSQPEMSVQEAETVTLSCTYDTSESDYYLFWYKQPPSRQMILVIRQEAYKQQNATENRFSVNFQKAAKSFSLKISDSQLGDAAMYFCAQGDTGKLIFGQGTTLQVKPDIQNPDPAVYQLRDSKSSDKSVCLFTDFDSQTNVSQSKDSDVYITDKTVLDMRSMDFKSNSAVAWSNKSDFACANAFNNSIIPEDTFFPSPESSCDVKLVEKSFETDTNLNFQNLSVIGFRILLLKVAGFNLLMTLRLWS

SEQ ID NO: 223 - protein, 314 aa, Homo sapiens
MSISLLCCAAFPLLWAGPVNAGVTQTPKFRILKIGQSMTLQCTQDMNHNYMYWYRQDPGMGLKLIYYSVGAGITDKGEVPNGYNVSRSTTEDFPLRLELAAPSQTSVYFCASSYLGPPGGANVLTFGAGSRLTVLEDLKNVFPPEVAVFEPSEAEISHTQKATLVCLATGFYPDHVELSWWVNGKEVHSGVSTDPQPLKEQPALNDSRYCLSSRLRVSATFWQNPRNHFRCQVQFYGLSENDEWTQDRAKPVTQIVSAEAWGRADCGFTSESYQQGVLSATILYEILLGKATLYAVLVSALVLMAMVKRKDSRG

SEQ ID NO: 224 - protein, 281 aa, Homo sapiens
MAMLLGASVLILWLQPDWVNSQQKNDDQQVKQNSPSLSVQEGRISILNCDYTNSMFDYFLWYKKYPAEGPTFLISISSIKDKNEDGRFTVFLNKSAKHLSLHIVPSQPGDSAVYFCAASAESGGGADGLTFGKGTHLIIQPYIQNPDPAVYQLRDSKSSDKSVCLFTDFDSQTNVSQSKDSDVYITDKTVLDMRSMDFKSNSAVAWSNKSDFACANAFNNSIIPEDTFFPSPESSCDVKLVEKSFETDTNLNFQNLSVIGFRILLLKVAGFNLLMTLRLWS

SEQ ID NO: 225 - protein, 308 aa, Homo sapiens
MGPGLLCWVLLCLLGAGPVDAGVTQSPTHLIKTRGQQVTLRCSPISGHKSVSWYQQVLGQGPQFIFQYYEKEERGRGNFPDRFSARQFPNYSSELNVNALLLGDSALYLCASSLYTGYGYTFGSGTRLTVVEDLNKVFPPEVAVFEPSEAEISHTQKATLVCLATGFFPDHVELSWWVNGKEVHSGVSTDPQPLKEQPALNDSRYCLSSRLRVSATFWQNPRNHFRCQVQFYGLSENDEWTQDRAKPVTQIVSAEAWGRADCGFTSVSYQQGVLSATILYEILLGKATLYAVLVSALVLMAMVKRKDF

SEQ ID NO: 226 - protein, 273 aa, Homo sapiens
MACPGFLWALVISTCLEFSMAQTVTQSQPEMSVQEAETVTLSCTYDTSESDYYLFWYKQPPSRQMILVIRQEAYKQQNATENRFSVNFQKAAKSFSLKISDSQLGDAAMYFCAYHDTDKLIFGTGTRLQVFPNIIQNPDPAVYQLRDSKSSDKSVCLFTDFDSQTNVSQSKDSDVYITDKTVLDMRSMDFKSNSAVAWSNKSDFACANAFNNSIIPEDTFFPSPESSCDVKLVEKSFETDTNLNFQNLSVIGFRILLLKVAGFNLLMTLRLWS

SEQ ID NO: 227 - protein, 311 aa, Homo sapiens
MSISLLCCAAFPLLWAGPVNAGVTQTPKFRILKIGQSMTLQCTQDMNHNYMYWYRQDPGMGLKLIYYSVGAGITDKGEVPNGYNVSRSTTEDFPLRLELAAPSQTSVYFCASTSTGGTDTQYFGPGTRLTVLEDLKNVFPPEVAVFEPSEAEISHTQKATLVCLATGFYPDHVELSWWVNGKEVHSGVSTDPQPLKEQPALNDSRYCLSSRLRVSATFWQNPRNHFRCQVQFYGLSENDEWTQDRAKPVTQIVSAEAWGRADCGFTSESYQQGVLSATILYEILLGKATLYAVLVSALVLMAMVKRKDSRG

SEQ ID NO: 228 - protein, 273 aa, Homo sapiens
MACPGFLWALVISTCLEFSMAQTVTQSQPEMSVQEAETVTLSCTYDTSESDYYLFWYKQPPSRQMILVIRQEAYKQQNATENRFSVNFQKAAKSFSLKISDSQLGDAAMYFCAYSENNNDMRFGAGTRLTVKPNIQNPDPAVYQLRDSKSSDKSVCLFTDFDSQTNVSQSKDSDVYITDKTVLDMRSMDFKSNSAVAWSNKSDFACANAFNNSIIPEDTFFPSPESSCDVKLVEKSFETDTNLNFQNLSVIGFRILLLKVAGFNLLMTLRLWS

SEQ ID NO: 229 - protein, 309 aa, Homo sapiens
MGPQLLGYVVLCLLGAGPLEAQVTQNPRYLITVTGKKLTVTCSQNMNHEYMSWYRQDPGLGLRQIYYSMNVEVTDKGDVPEGYKVSRKEKRNFPLILESPSPNQTSLYFCASGGAGAYYGYTFGSGTRLTVVEDLNKVFPPEVAVFEPSEAEISHTQKATLVCLATGFFPDHVELSWWVNGKEVHSGVSTDPQPLKEQPALNDSRYCLSSRLRVSATFWQNPRNHFRCQVQFYGLSENDEWTQDRAKPVTQIVSAEAWGRADCGFTSVSYQQGVLSATILYEILLGKATLYAVLVSALVLMAMVKRKDF

SEQ ID NO: 230 - protein, 309 aa, Homo sapiens
MGPQLLGYVVLCLLGAGPLEAQVTQNPRYLITVTGKKLTVTCSQNMNHEYMSWYRQDPGLGLRQIYYSMNVEVTDKGDVPEGYKVSRKEKRNFPLILESPSPNQTSLYFCASSSQGTGYGYTFGSGTRLTVVEDLNKVFPPEVAVFEPSEAEISHTQKATLVCLATGFFPDHVELSWWVNGKEVHSGVSTDPQPLKEQPALNDSRYCLSSRLRVSATFWQNPRNHFRCQVQFYGLSENDEWTQDRAKPVTQIVSAEAWGRADCGFTSVSYQQGVLSATILYEILLGKATLYAVLVSALVLMAMVKRKDF

SEQ ID NO: 231 - protein, 273 aa, Homo sapiens
MACPGFLWALVISTCLEFSMAQTVTQSQPEMSVQEAETVTLSCTYDTSESDYYLFWYKQPPSRQMILVIRQEAYKQQNATENRFSVNFQKAAKSFSLKISDSQLGDAAMYFCAYKEGAQKLVFGQGTRLTINPNIQNPDPAVYQLRDSKSSDKSVCLFTDFDSQTNVSQSKDSDVYITDKTVLDMRSMDFKSNSAVAWSNKSDFACANAFNNSIIPEDTFFPSPESSCDVKLVEKSFETDTNLNFQNLSVIGFRILLLKVAGFNLLMTLRLWS

SEQ ID NO: 232 - protein, 316 aa, Homo sapiens
MGCRLLCCVVFCLLQAGPLDTAVSQTPKYLVTQMGNDKSIKCEQNLGHDTMYWYKQDSKKFLKIMFSYNNKELIINETVPNRFSPKSPDKAHLNLHINSLELGDSAVYFCASSQVLAGGTVSTDTQYFGPGTRLTVLEDLKNVFPPEVAVFEPSEAEISHTQKATLVCLATGFYPDHVELSWWVNGKEVHSGVSTDPQPLKEQPALNDSRYCLSSRLRVSATFWQNPRNHFRCQVQFYGLSENDEWTQDRAKPVTQIVSAEAWGRADCGFTSESYQQGVLSATILYEILLGKATLYAVLVSALVLMAMVKRKDSRG

SEQ ID NO: 233 - protein, 310 aa, Homo sapiens
MSISLLCCAAFPLLWAGPVNAGVTQTPKFRILKIGQSMTLQCTQDMNHNYMYWYRQDPGMGLKLIYYSVGAGITDKGEVPNGYNVSRSTTEDFPLRLELAAPSQTSVYFCASRATGIPQEKLFFGSGTQLSVLEDLNKVFPPEVAVFEPSEAEISHTQKATLVCLATGFFPDHVELSWWVNGKEVHSGVSTDPQPLKEQPALNDSRYCLSSRLRVSATFWQNPRNHFRCQVQFYGLSENDEWTQDRAKPVTQIVSAEAWGRADCGFTSVSYQQGVLSATILYEILLGKATLYAVLVSALVLMAMVKRKDF

SEQ ID NO: 234 - protein, 279 aa, Homo sapiens
MEKMLECAFIVLWLQLGWLSGEDQVTQSPEALRLQEGESSSLNCSYTVSGLRGLFWYRQDPGKGPEFLFTLYSAGEEKEKERLKATLTKKESFLHITAPKPEDSATYLCAVQPVLWGNVLHCFGNVLHCGSGTQVIVLPHIQNPDPAVYQLRDSKSSDKSVCLFTDFDSQTNVSQSKDSDVYITDKTVLDMRSMDFKSNSAVAWSNKSDFACANAFNNSIIPEDTFFPSPESSCDVKLVEKSFETDTNLNFQNLSVIGFRILLLKVAGFNLLMTLRLWS

SEQ ID NO: 235 - protein, 311 aa, Homo sapiens
MGTSLLCWVVLGFLGTDHTGAGVSQSPRYKVTKRGQDVALRCDPISGHVSLYWYRQALGQGPEFLTYFNYEAQQDKSGLPNDRFSAERPEGSISTLTIQRTEQRDSAMYRCASSLVGDETQYFGPGTRLLVLEDLKNVFPPEVAVFEPSEAEISHTQKATLVCLATGFYPDHVELSWWVNGKEVHSGVSTDPQPLKEQPALNDSRYCLSSRLRVSATFWQNPRNHFRCQVQFYGLSENDEWTQDRAKPVTQIVSAEAWGRADCGFTSESYQQGVLSATILYEILLGKATLYAVLVSALVLMAMVKRKDSRG

SEQ ID NO: 236 - protein, 273 aa, Homo sapiens
MEKMLECAFIVLWLQLGWLSGEDQVTQSPEALRLQEGESSSLNCSYTVSGLRGLFWYRQDPGKGPEFLFTLYSAGEEKEKERLKATLTKKESFLHITAPKPEDSATYLCAVDASSSNTGKLIFGQGTTLQVKPDIQNPDPAVYQLRDSKSSDKSVCLFTDFDSQTNVSQSKDSDVYITDKTVLDMRSMDFKSNSAVAWSNKSDFACANAFNNSIIPEDTFFPSPESSCDVKLVEKSFETDTNLNFQNLSVIGFRILLLKVAGFNLLMTLRLWS

SEQ ID NO: 237 - protein, 310 aa, Homo sapiens
MGTSLLCWMALCLLGADHADTGVSQNPRHKITKRGQNVTFRCDPISEHNRLYWYRQTLGQGPEFLTYFQNEAQLEKSRLLSDRFSAERPKGSFSTLEIQRTEQGDSAMYLCASSLIEEFYGYTFGSGTRLTVVEDLNKVFPPEVAVFEPSEAEISHTQKATLVCLATGFFPDHVELSWWVNGKEVHSGVSTDPQPLKEQPALNDSRYCLSSRLRVSATFWQNPRNHFRCQVQFYGLSENDEWTQDRAKPVTQIVSAEAWGRADCGFTSVSYQQGVLSATILYEILLGKATLYAVLVSALVLMAMVKRKDF

SEQ ID NO: 238 - protein, 275 aa, Homo sapiens
MACPGFLWALVISTCLEFSMAQTVTQSQPEMSVQEAETVTLSCTYDTSESDYYLFWYKQPPSRQMILVIRQEAYKQQNATENRFSVNFQKAAKSFSLKISDSQLGDAAMYFCAFSNSNSGYALNFGKGTSLLVTPHIQNPDPAVYQLRDSKSSDKSVCLFTDFDSQTNVSQSKDSDVYITDKTVLDMRSMDFKSNSAVAWSNKSDFACANAFNNSIIPEDTFFPSPESSCDVKLVEKSFETDTNLNFQNLSVIGFRILLLKVAGFNLLMTLRLWS

SEQ ID NO: 239 - protein, 312 aa, Homo sapiens
MSISLLCCAAFPLLWAGPVNAGVTQTPKFRILKIGQSMTLQCTQDMNHNYMYWYRQDPGMGLKLIYYSVGAGITDKGEVPNGYNVSRSTTEDFPLRLELAAPSQTSVYFCASGNGVLSTGELFFGEGSRLTVLEDLKNVFPPEVAVFEPSEAEISHTQKATLVCLATGFYPDHVELSWWVNGKEVHSGVSTDPQPLKEQPALNDSRYCLSSRLRVSATFWQNPRNHFRCQVQFYGLSENDEWTQDRAKPVTQIVSAEAWGRADCGFTSESYQQGVLSATILYEILLGKATLYAVLVSALVLMAMVKRKDSRG

SEQ ID NO: 240 - protein, 273 aa, Homo sapiens
MACPGFLWALVISTCLEFSMAQTVTQSQPEMSVQEAETVTLSCTYDTSESDYYLFWYKQPPSRQMILVIRQEAYKQQNATENRFSVNFQKAAKSFSLKISDSQLGDAAMYFCAYPSNNNDMRFGAGTRLTVKPNIQNPDPAVYQLRDSKSSDKSVCLFTDFDSQTNVSQSKDSDVYITDKTVLDMRSMDFKSNSAVAWSNKSDFACANAFNNSIIPEDTFFPSPESSCDVKLVEKSFETDTNLNFQNLSVIGFRILLLKVAGFNLLMTLRLWS

SEQ ID NO: 241 - protein, 312 aa, Homo sapiens
MGFRLLCCVAFCLLGAGPVDSGVTQTPKHLITATGQRVTLRCSPRSGDLSVYWYQQSLDQGLQFLIQYYNGEERAKGNILERFSAQQFPDLHSELNLSSLELGDSALYFCASSVNTGGWETQYFGPGTRLLVLEDLKNVFPPEVAVFEPSEAEISHTQKATLVCLATGFYPDHVELSWWVNGKEVHSGVSTDPQPLKEQPALNDSRYCLSSRLRVSATFWQNPRNHFRCQVQFYGLSENDEWTQDRAKPVTQIVSAEAWGRADCGFTSESYQQGVLSATILYEILLGKATLYAVLVSALVLMAMVKRKDSRG

SEQ ID NO: 242 - protein, 274 aa, Homo sapiens
MESFLGGVLLILWLQVDWVKSQKIEQNSEALNIQEGKTATLTCNYTNYSPAYLQWYRQDPGRGPVFLLLIRENEKEKRKERLKVTFDTTLKQSLFHITASQPADSATYLCALDGNGGSQGNLIFGKGTKLSVKPNIQNPDPAVYQLRDSKSSDKSVCLFTDFDSQTNVSQSKDSDVYITDKTVLDMRSMDFKSNSAVAWSNKSDFACANAFNNSIIPEDTFFPSPESSCDVKLVEKSFETDTNLNFQNLSVIGFRILLLKVAGFNLLMTLRLWS

SEQ ID NO: 243 - protein, 312 aa, Homo sapiens
MGCRLLCCVVFCLLQAGPLDTAVSQTPKYLVTQMGNDKSIKCEQNLGHDTMYWYKQDSKKFLKIMFSYNNKELIINETVPNRFSPKSPDKAHLNLHINSLELGDSAVYFCASSSGLVSWDEQFFGPGTRLTVLEDLKNVFPPEVAVFEPSEAEISHTQKATLVCLATGFYPDHVELSWWVNGKEVHSGVSTDPQPLKEQPALNDSRYCLSSRLRVSATFWQNPRNHFRCQVQFYGLSENDEWTQDRAKPVTQIVSAEAWGRADCGFTSESYQQGVLSATILYEILLGKATLYAVLVSALVLMAMVKRKDSRG

SEQ ID NO: 244 - protein, 273 aa, Homo sapiens
MACPGFLWALVISTCLEFSMAQTVTQSQPEMSVQEAETVTLSCTYDTSESDYYLFWYKQPPSRQMILVIRQEAYKQQNATENRFSVNFQKAAKSFSLKISDSQLGDAAMYFCAYGDTDKLIFGTGTRLQVFPNIIQNPDPAVYQLRDSKSSDKSVCLFTDFDSQTNVSQSKDSDVYITDKTVLDMRSMDFKSNSAVAWSNKSDFACANAFNNSIIPEDTFFPSPESSCDVKLVEKSFETDTNLNFQNLSVIGFRILLLKVAGFNLLMTLRLWS

SEQ ID NO: 245 - protein, 311 aa, Homo sapiens
MSISLLCCAAFPLLWAGPVNAGVTQTPKFRILKIGQSMTLQCTQDMNHNYMYWYRQDPGMGLKLIYYSVGAGITDKGEVPNGYNVSRSTTEDFPLRLELAAPSQTSVYFCASSYRGGTDTQYFGPGTRLTVLEDLKNVFPPEVAVFEPSEAEISHTQKATLVCLATGFYPDHVELSWWVNGKEVHSGVSTDPQPLKEQPALNDSRYCLSSRLRVSATFWQNPRNHFRCQVQFYGLSENDEWTQDRAKPVTQIVSAEAWGRADCGFTSESYQQGVLSATILYEILLGKATLYAVLVSALVLMAMVKRKDSRG

SEQ ID NO: 246 - protein, 274 aa, Homo sapiens
MLLLLIPVLGMIFALRDARAQSVSQHNHHVILSEAASLELGCNYSYGGTVNLFWYVQYPGQHLQLLLKYFSGDPLVKGIKGFEAEFIKSKFSFNLRKPSVQWSDTAEYFCAVNEGSGTYKYIFGTGTRLKVLANIIQNPDPAVYQLRDSKSSDKSVCLFTDFDSQTNVSQSKDSDVYITDKTVLDMRSMDFKSNSAVAWSNKSDFACANAFNNSIIPEDTFFPSPESSCDVKLVEKSFETDTNLNFQNLSVIGFRILLLKVAGFNLLMTLRLWS

SEQ ID NO: 247 - protein, 313 aa, Homo sapiens
MGTRLLCWVAFCLLVEELIEAGVVQSPRYKIIEKKQPVAFWCNPISGHNTLYWYLQNLGQGPELLIRYENEEAVDDSQLPKDRFSAERLKGVDSTLKIQPAELGDSAVYLCASSLRSSLAYEQYFGPGTRLTVTEDLKNVFPPEVAVFEPSEAEISHTQKATLVCLATGFYPDHVELSWWVNGKEVHSGVSTDPQPLKEQPALNDSRYCLSSRLRVSATFWQNPRNHFRCQVQFYGLSENDEWTQDRAKPVTQIVSAEAWGRADCGFTSESYQQGVLSATILYEILLGKATLYAVLVSALVLMAMVKRKDSRG

SEQ ID NO: 248 - protein, 273 aa, Homo sapiens
MACPGFLWALVISTCLEFSMAQTVTQSQPEMSVQEAETVTLSCTYDTSESDYYLFWYKQPPSRQMILVIRQEAYKQQNATENRFSVNFQKAAKSFSLKISDSQLGDAAMYFCAYGWTASKLTFGTGTRLQVTLDIQNPDPAVYQLRDSKSSDKSVCLFTDFDSQTNVSQSKDSDVYITDKTVLDMRSMDFKSNSAVAWSNKSDFACANAFNNSIIPEDTFFPSPESSCDVKLVEKSFETDTNLNFQNLSVIGFRILLLKVAGFNLLMTLRLWS

SEQ ID NO: 249 - protein, 309 aa, Homo sapiens
MSISLLCCAAFPLLWAGPVNAGVTQTPKFRILKIGQSMTLQCTQDMNHNYMYWYRQDPGMGLKLIYYSVGAGITDKGEVPNGYNVSRSTTEDFPLRLELAAPSQTSVYFCASSWTVSNQPQHFGDGTRLSILEDLNKVFPPEVAVFEPSEAEISHTQKATLVCLATGFFPDHVELSWWVNGKEVHSGVSTDPQPLKEQPALNDSRYCLSSRLRVSATFWQNPRNHFRCQVQFYGLSENDEWTQDRAKPVTQIVSAEAWGRADCGFTSVSYQQGVLSATILYEILLGKATLYAVLVSALVLMAMVKRKDF

SEQ ID NO: 250 - protein, 271 aa, Homo sapiens
MTSIRAVFIFLWLQLDLVNGENVEQHPSTLSVQEGDSAVIKCTYSDSASNYFPWYKQELGKGPQLIIDIRSNVGEKKDQRIAVTLNKTAKHFSLHITETQPEDSAVYFCAASPLTGNQFYFGTGTSLTVIPNIQNPDPAVYQLRDSKSSDKSVCLFTDFDSQTNVSQSKDSDVYITDKTVLDMRSMDFKSNSAVAWSNKSDFACANAFNNSIIPEDTFFPSPESSCDVKLVEKSFETDTNLNFQNLSVIGFRILLLKVAGFNLLMTLRLWS

SEQ ID NO: 251 - protein, 321 aa, Homo sapiens
MLLLLLLLGPGISLLLPGSLAGSGLGAVVSQHPSWVICKSGTSVKIECRSLDFQATTMFWYRQFPKQSLMLMATSNEGSKATYEQGVEKDKFLINHASLTLSTLTVTSAHPEDSSFYICSARVRTGVKNIQYFGAGTRLSVLEDLKNVFPPEVAVFEPSEAEISHTQKATLVCLATGFYPDHVELSWWVNGKEVHSGVSTDPQPLKEQPALNDSRYCLSSRLRVSATFWQNPRNHFRCQVQFYGLSENDEWTQDRAKPVTQIVSAEAWGRADCGFTSESYQQGVLSATILYEILLGKATLYAVLVSALVLMAMVKRKDSRG

SEQ ID NO: 252 - protein, 276 aa, Homo sapiens
MASAPISMLAMLFTLSGLRAQSVAQPEDQVNVAEGNPLTVKCTYSVSGNPYLFWYVQYPNRGLQFLLKYITGDNLVKGSYGFEAEFNKSQTSFHLKKPSALVSDSALYFCAVRDYAAEDSGYALNFGKGTSLLVTPHIQNPDPAVYQLRDSKSSDKSVCLFTDFDSQTNVSQSKDSDVYITDKTVLDMRSMDFKSNSAVAWSNKSDFACANAFNNSIIPEDTFFPSPESSCDVKLVEKSFETDTNLNFQNLSVIGFRILLLKVAGFNLLMTLRLWS

SEQ ID NO: 253 - protein, 311 aa, Homo sapiens
MGTRLLCWAALCLLGADHTGAGVSQTPSNKVTEKGKYVELRCDPISGHTALYWYRQSLGQGPEFLIYFQGTGAADDSGLPNDRFFAVRPEGSVSTLKIQRTERGDSAVYLCASSFGTTETQYFGPGTRLLVLEDLKNVFPPEVAVFEPSEAEISHTQKATLVCLATGFYPDHVELSWWVNGKEVHSGVSTDPQPLKEQPALNDSRYCLSSRLRVSATFWQNPRNHFRCQVQFYGLSENDEWTQDRAKPVTQIVSAEAWGRADCGFTSESYQQGVLSATILYEILLGKATLYAVLVSALVLMAMVKRKDSRG

SEQ ID NO: 254 - protein, 273 aa, Homo sapiens
MLTASLLRAVIASICVVSSMAQKVTQAQTEISVVEKEDVTLDCVYETRDTTYYLFWYKQPPSGELVFLIRRNSFDEQNEISGRYSWNFQKSTSSFNFTITASQVVDSAVYFCALFGNDYKLSFGAGTTVTVRANIQNPDPAVYQLRDSKSSDKSVCLFTDFDSQTNVSQSKDSDVYITDKTVLDMRSMDFKSNSAVAWSNKSDFACANAFNNSIIPEDTFFPSPESSCDVKLVEKSFETDTNLNFQNLSVIGFRILLLKVAGFNLLMTLRLWS

SEQ ID NO: 255 - protein, 312 aa, Homo sapiens
MSNQVLCCVVLCFLGANTVDGGITQSPKYLFRKEGQNVTLSCEQNLNHDAMYWYRQDPGQGLRLIYYSQIVNDFQKGDIAEGYSVSREKKESFPLTVTSAQKNPTAFYLCASSEPVPPTDTQYFGPGTRLTVLEDLKNVFPPEVAVFEPSEAEISHTQKATLVCLATGFYPDHVELSWWVNGKEVHSGVSTDPQPLKEQPALNDSRYCLSSRLRVSATFWQNPRNHFRCQVQFYGLSENDEWTQDRAKPVTQIVSAEAWGRADCGFTSESYQQGVLSATILYEILLGKATLYAVLVSALVLMAMVKRKDSRG

SEQ ID NO: 256 - protein, 275 aa, Homo sapiens
MACPGFLWALVISTCLEFSMAQTVTQSQPEMSVQEAETVTLSCTYDTSESDYYLFWYKQPPSRQMILVIRQEAYKQQNATENRFSVNFQKAAKSFSLKISDSQLGDAAMYFCAYSIDNYGQNFVFGPGTRLSVLPYIQNPDPAVYQLRDSKSSDKSVCLFTDFDSQTNVSQSKDSDVYITDKTVLDMRSMDFKSNSAVAWSNKSDFACANAFNNSIIPEDTFFPSPESSCDVKLVEKSFETDTNLNFQNLSVIGFRILLLKVAGFNLLMTLRLWS

SEQ ID NO: 257 - protein, 313 aa, Homo sapiens
MGSRLLCWVLLCLLGAGPVKAGVTQTPRYLIKTRGQQVTLSCSPISGHRSVSWYQQTPGQGLQFLFEYFSETQRNKGNFPGRFSGRQFSNSRSEMNVSTLELGDSALYLCASSIGTSGSADTQYFGPGTRLTVLEDLKNVFPPEVAVFEPSEAEISHTQKATLVCLATGFYPDHVELSWWVNGKEVHSGVSTDPQPLKEQPALNDSRYCLSSRLRVSATFWQNPRNHFRCQVQFYGLSENDEWTQDRAKPVTQIVSAEAWGRADCGFTSESYQQGVLSATILYEILLGKATLYAVLVSALVLMAMVKRKDSRG

SEQ ID NO: 258 - protein, 274 aa, Homo sapiens
MLLLLIPVLGMIFALRDARAQSVSQHNHHVILSEAASLELGCNYSYGGTVNLFWYVQYPGQHLQLLLKYFSGDPLVKGIKGFEAEFIKSKFSFNLRKPSVQWSDTAEYFCAVKGGSSNTGKLIFGQGTTLQVKPDIQNPDPAVYQLRDSKSSDKSVCLFTDFDSQTNVSQSKDSDVYITDKTVLDMRSMDFKSNSAVAWSNKSDFACANAFNNSIIPEDTFFPSPESSCDVKLVEKSFETDTNLNFQNLSVIGFRILLLKVAGFNLLMTLRLWS

SEQ ID NO: 259 - protein, 317 aa, Homo sapiens
MGCRLLCCAVLCLLGAGELVPMETGVTQTPRHLVMGMTNKKSLKCEQHLGHNAMYWYKQSAKKPLELMFVYSLEERVENNSVPSRFSPECPNSSHLFLHLHTLQPEDSALYLCASSFSFYPDETYEQYFGPGTRLTVTEDLKNVFPPEVAVFEPSEAEISHTQKATLVCLATGFYPDHVELSWWVNGKEVHSGVSTDPQPLKEQPALNDSRYCLSSRLRVSATFWQNPRNHFRCQVQFYGLSENDEWTQDRAKPVTQIVSAEAWGRADCGFTSESYQQGVLSATILYEILLGKATLYAVLVSALVLMAMVKRKDSRG

SEQ ID NO: 260 - protein, 271 aa, Homo sapiens
MACPGFLWALVISTCLEFSMAQTVTQSQPEMSVQEAETVTLSCTYDTSESDYYLFWYKQPPSRQMILVIRQEAYKQQNATENRFSVNFQKAAKSFSLKISDSQLGDAAMYFCAYREDQFYFGTGTSLTVIPNIQNPDPAVYQLRDSKSSDKSVCLFTDFDSQTNVSQSKDSDVYITDKTVLDMRSMDFKSNSAVAWSNKSDFACANAFNNSIIPEDTFFPSPESSCDVKLVEKSFETDTNLNFQNLSVIGFRILLLKVAGFNLLMTLRLWS

SEQ ID NO: 261 - protein, 313 aa, Homo sapiens
MSLGLLCCGAFSLLWAGPVNAGVTQTPKFRVLKTGQSMTLLCAQDMNHEYMYWYRQDPGMGLRLIHYSVGEGTTAKGEVPDGYNVSRLKKQNFLLGLESAAPSQTSVYFCASSLTSGSRTGELFFGEGSRLTVLEDLKNVFPPEVAVFEPSEAEISHTQKATLVCLATGFYPDHVELSWWVNGKEVHSGVSTDPQPLKEQPALNDSRYCLSSRLRVSATFWQNPRNHFRCQVQFYGLSENDEWTQDRAKPVTQIVSAEAWGRADCGFTSESYQQGVLSATILYEILLGKATLYAVLVSALVLMAMVKRKDSRG

SEQ ID NO: 262 - protein, 273 aa, Homo sapiens
METLLGVSLVILWLQLARVNSQQGEEDPQALSIQEGENATMNCSYKTSINNLQWYRQNSGRGLVHLILIRSNEREKHSGRLRVTLDTSKKSSSLLITASRAADTASYFCATAGFNNAGNMLTFGGGTRLMVKPHIQNPDPAVYQLRDSKSSDKSVCLFTDFDSQTNVSQSKDSDVYITDKTVLDMRSMDFKSNSAVAWSNKSDFACANAFNNSIIPEDTFFPSPESSCDVKLVEKSFETDTNLNFQNLSVIGFRILLLKVAGFNLLMTLRLWS

SEQ ID NO: 263 - protein, 312 aa, Homo sapiens
MSNQVLCCVVLCFLGANTVDGGITQSPKYLFRKEGQNVTLSCEQNLNHDAMYWYRQDPGQGLRLIYYSQIVNDFQKGDIAEGYSVSREKKESFPLTVTSAQKNPTAFYLCASSIGQLGGYEQFFGPGTRLTVLEDLKNVFPPEVAVFEPSEAEISHTQKATLVCLATGFYPDHVELSWWVNGKEVHSGVSTDPQPLKEQPALNDSRYCLSSRLRVSATFWQNPRNHFRCQVQFYGLSENDEWTQDRAKPVTQIVSAEAWGRADCGFTSESYQQGVLSATILYEILLGKATLYAVLVSALVLMAMVKRKDSRG

SEQ ID NO: 264 - protein, 272 aa, Homo sapiens
MACPGFLWALVISTCLEFSMAQTVTQSQPEMSVQEAETVTLSCTYDTSESDYYLFWYKQPPSRQMILVIRQEAYKQQNATENRFSVNFQKAAKSFSLKISDSQLGDAAMYFCAYRDNARLMFGDGTQLVVKPNIQNPDPAVYQLRDSKSSDKSVCLFTDFDSQTNVSQSKDSDVYITDKTVLDMRSMDFKSNSAVAWSNKSDFACANAFNNSIIPEDTFFPSPESSCDVKLVEKSFETDTNLNFQNLSVIGFRILLLKVAGFNLLMTLRLWS

SEQ ID NO: 265 - protein, 311 aa, Homo sapiens
MSISLLCCAAFPLLWAGPVNAGVTQTPKFRILKIGQSMTLQCTQDMNHNYMYWYRQDPGMGLKLIYYSVGAGITDKGEVPNGYNVSRSTTEDFPLRLELAAPSQTSVYFCASTLGQGRDEQFFGPGTRLTVLEDLKNVFPPEVAVFEPSEAEISHTQKATLVCLATGFYPDHVELSWWVNGKEVHSGVSTDPQPLKEQPALNDSRYCLSSRLRVSATFWQNPRNHFRCQVQFYGLSENDEWTQDRAKPVTQIVSAEAWGRADCGFTSESYQQGVLSATILYEILLGKATLYAVLVSALVLMAMVKRKDSRG

SEQ ID NO: 266 - protein, 272 aa, Homo sapiens
MKTFAGFSFLFLWLQLDCMSRGEDVEQSLFLSVREGDSSVINCTYTDSSSTYLYWYKQEPGAGLQLLTYIFSNMDMKQDQRLTVLLNKKDKHLSLRIADTQTGDSAIYFCAERPGGSYIPTFGRGTSLIVHPYIQNPDPAVYQLRDSKSSDKSVCLFTDFDSQTNVSQSKDSDVYITDKTVLDMRSMDFKSNSAVAWSNKSDFACANAFNNSIIPEDTFFPSPESSCDVKLVEKSFETDTNLNFQNLSVIGFRILLLKVAGFNLLMTLRLWS

SEQ ID NO: 267 - protein, 311 aa, Homo sapiens
MGTRLLCWAALCLLGAELTEAGVAQSPRYKIIEKRQSVAFWCNPISGHATLYWYQQILGQGPKLLIQFQNNGVVDDSQLPKDRFSAERLKGVDSTLKIQPAKLEDSAVYLCASSLGAGSDYGYTFGSGTRLTVVEDLNKVFPPEVAVFEPSEAEISHTQKATLVCLATGFFPDHVELSWWVNGKEVHSGVSTDPQPLKEQPALNDSRYCLSSRLRVSATFWQNPRNHFRCQVQFYGLSENDEWTQDRAKPVTQIVSAEAWGRADCGFTSVSYQQGVLSATILYEILLGKATLYAVLVSALVLMAMVKRKDF

SEQ ID NO: 268 - protein, 273 aa, Homo sapiens
MACPGFLWALVISTCLEFSMAQTVTQSQPEMSVQEAETVTLSCTYDTSESDYYLFWYKQPPSRQMILVIRQEAYKQQNATENRFSVNFQKAAKSFSLKISDSQLGDAAMYFCAYLEGGNQFYFGTGTSLTVIPNIQNPDPAVYQLRDSKSSDKSVCLFTDFDSQTNVSQSKDSDVYITDKTVLDMRSMDFKSNSAVAWSNKSDFACANAFNNSIIPEDTFFPSPESSCDVKLVEKSFETDTNLNFQNLSVIGFRILLLKVAGFNLLMTLRLWS

SEQ ID NO: 269 - protein, 309 aa, Homo sapiens
MGFRLLCCVAFCLLGAGPVDSGVTQTPKHLITATGQRVTLRCSPRSGDLSVYWYQQSLDQGLQFLIQYYNGEERAKGNILERFSAQQFPDLHSELNLSSLELGDSALYFCASSFSYNEQFFGPGTRLTVLEDLKNVFPPEVAVFEPSEAEISHTQKATLVCLATGFYPDHVELSWWVNGKEVHSGVSTDPQPLKEQPALNDSRYCLSSRLRVSATFWQNPRNHFRCQVQFYGLSENDEWTQDRAKPVTQIVSAEAWGRADCGFTSESYQQGVLSATILYEILLGKATLYAVLVSALVLMAMVKRKDSRG

SEQ ID NO: 270 - protein, 273 aa, Homo sapiens
MAGIRALFMYLWLQLDWVSRGESVGLHLPTLSVQEGDNSIINCAYSNSASDYFIWYKQESGKGPQFIIDIRSNMDKRQGQRVTVLLNKTVKHLSLQIAATQPGDSAVYFCAEKGAGTYKYIFGTGTRLKVLANIIQNPDPAVYQLRDSKSSDKSVCLFTDFDSQTNVSQSKDSDVYITDKTVLDMRSMDFKSNSAVAWSNKSDFACANAFNNSIIPEDTFFPSPESSCDVKLVEKSFETDTNLNFQNLSVIGFRILLLKVAGFNLLMTLRLWS

SEQ ID NO: 271 - protein, 318 aa, Homo sapiens
MLLLLLLLGPGISLLLPGSLAGSGLGAVVSQHPSWVICKSGTSVKIECRSLDFQATTMFWYRQFPKQSLMLMATSNEGSKATYEQGVEKDKFLINHASLTLSTLTVTSAHPEDSSFYICSARDGSYPEKLFFGSGTQLSVLEDLNKVFPPEVAVFEPSEAEISHTQKATLVCLATGFFPDHVELSWWVNGKEVHSGVSTDPQPLKEQPALNDSRYCLSSRLRVSATFWQNPRNHFRCQVQFYGLSENDEWTQDRAKPVTQIVSAEAWGRADCGFTSVSYQQGVLSATILYEILLGKATLYAVLVSALVLMAMVKRKDF

SEQ ID NO: 272 - protein, 273 aa, Homo sapiens
METLLGLLILWLQLQWVSSKQEVTQIPAALSVPEGENLVLNCSFTDSAIYNLQWFRQDPGKGLTSLLLIQSSQREQTSGRLNASLDKSSGRSTLYIAASQPGDSATYLCAVKLWMDSSYKLIFGSGTRLLVRPDIQNPDPAVYQLRDSKSSDKSVCLFTDFDSQTNVSQSKDSDVYITDKTVLDMRSMDFKSNSAVAWSNKSDFACANAFNNSIIPEDTFFPSPESSCDVKLVEKSFETDTNLNFQNLSVIGFRILLLKVAGFNLLMTLRLWS

SEQ ID NO: 273 - protein, 307 aa, Homo sapiens
MGIRLLCRVAFCFLAVGLVDVKVTQSSRYLVKRTGEKVFLECVQDMDHENMFWYRQDPGLGLRLIYFSYDVKMKEKGDIPEGYSVSREKKERFSLILESASTNQTSMYLCASKYGPEGYTFGSGTRLTVVEDLNKVFPPEVAVFEPSEAEISHTQKATLVCLATGFFPDHVELSWWVNGKEVHSGVSTDPQPLKEQPALNDSRYCLSSRLRVSATFWQNPRNHFRCQVQFYGLSENDEWTQDRAKPVTQIVSAEAWGRADCGFTSVSYQQGVLSATILYEILLGKATLYAVLVSALVLMAMVKRKDF

SEQ ID NO: 274 - protein, 270 aa, Homo sapiens
MRQVARVIVFLTLSTLSLAKTTQPISMDSYEGQEVNITCSHNNIATNDYITWYQQFPSQGPRFIIQGYKTKVTNEVASLFIPADRKSSTLSLPRVSLSDTAVYYCLVVETDSWGKLQFEFGAGTQVVVTPDIQNPDPAVYQLRDSKSSDKSVCLFTDFDSQTNVSQSKDSDVYITDKTVLDMRSMDFKSNSAVAWSNKSDFACANAFNNSIIPEDTFFPSPESSCDVKLVEKSFETDTNLNFQNLSVIGFRILLLKVAGFNLLMTLRLWS

SEQ ID NO: 275 - protein, 316 aa, Homo sapiens
MLLLLLLLGPGISLLLPGSLAGSGLGAVVSQHPSWVICKSGTSVKIECRSLDFQATTMFWYRQFPKQSLMLMATSNEGSKATYEQGVEKDKFLINHASLTLSTLTVTSAHPEDSSFYICSAAGQGGGYTFGSGTRLTVVEDLNKVFPPEVAVFEPSEAEISHTQKATLVCLATGFFPDHVELSWWVNGKEVHSGVSTDPQPLKEQPALNDSRYCLSSRLRVSATFWQNPRNHFRCQVQFYGLSENDEWTQDRAKPVTQIVSAEAWGRADCGFTSVSYQQGVLSATILYEILLGKATLYAVLVSALVLMAMVKRKDF

SEQ ID NO: 276 - protein, 310 aa, Homo sapiens
MSISLLCCAAFPLLWAGPVNAGVTQTPKFRILKIGQSMTLQCTQDMNHNYMYWYRQDPGMGLKLIYYSVGAGITDKGEVPNGYNVSRSTTEDFPLRLELAAPSQTSVYFCASRSGGLGNQPQHFGDGTRLSILEDLNKVFPPEVAVFEPSEAEISHTQKATLVCLATGFFPDHVELSWWVNGKEVHSGVSTDPQPLKEQPALNDSRYCLSSRLRVSATFWQNPRNHFRCQVQFYGLSENDEWTQDRAKPVTQIVSAEAWGRADCGFTSVSYQQGVLSATILYEILLGKATLYAVLVSALVLMAMVKRKDF

SEQ ID NO: 277 - protein, 277 aa, Homo sapiens
MLLLLVPVLEVIFTLGGTRAQSVTQLDSHVSVSEGTPVLLRCNYSSSYSPSLFWYVQHPNKGLQLLLKYTSAATLVKGINGFEAEFKKSETSFHLTKPSAHMSDAAEYFCVVSERSADSWGKFQFEFGAGTQVVVTPDIQNPDPAVYQLRDSKSSDKSVCLFTDFDSQTNVSQSKDSDVYITDKTVLDMRSMDFKSNSAVAWSNKSDFACANAFNNSIIPEDTFFPSPESSCDVKLVEKSFETDTNLNFQNLSVIGFRILLLKVAGFNLLMTLRLWS

SEQ ID NO: 278 - protein, 275 aa, Homo sapiens
MVKIRQFLLAILWLQLSCVSAAKNEVEQSPQNLTAQEGEFITINCSYSVGISALHWLQQHPGGGIVSLFMLSSGKKKHGRLIATINIQEKHSSLHITASHPRDSAVYICAVSVETSSGSARQLTFGSGTQLTVLPDIQNPDPAVYQLRDSKSSDKSVCLFTDFDSQTNVSQSKDSDVYITDKTVLDMRSMDFKSNSAVAWSNKSDFACANAFNNSIIPEDTFFPSPESSCDVKLVEKSFETDTNLNFQNLSVIGFRILLLKVAGFNLLMTLRLWS

SEQ ID NO: 279 - protein, 9 aa, Severe acute respiratory syndrome coronavirus 2
LLYDANYFL

SEQ ID NO: 280 - protein, 272 aa, Homo sapiens
MLLLLIPVLGMIFALRDARAQSVSQHNHHVILSEAASLELGCNYSYGGTVNLFWYVQYPGQHLQLLLKYFSGDPLVKGIKGFEAEFIKSKFSFNLRKPSVQWSDTAEYFCAVINSGNTPLVFGKGTRLSVIANIQNPDPAVYQLRDSKSSDKSVCLFTDFDSQTNVSQSKDSDVYITDKTVLDMRSMDFKSNSAVAWSNKSDFACANAFNNSIIPEDTFFPSPESSCDVKLVEKSFETDTNLNFQNLSVIGFRILLLKVAGFNLLMTLRLWS

SEQ ID NO: 281 - protein, 308 aa, Homo sapiens
MGTRLLCWAALCLLGAELTEAGVAQSPRYKIIEKRQSVAFWCNPISGHATLYWYQQILGQGPKLLIQFQNNGVVDDSQLPKDRFSAERLKGVDSTLKIQPAKLEDSAVYLCASSLGGTEAFFGQGTRLTVVEDLNKVFPPEVAVFEPSEAEISHTQKATLVCLATGFFPDHVELSWWVNGKEVHSGVSTDPQPLKEQPALNDSRYCLSSRLRVSATFWQNPRNHFRCQVQFYGLSENDEWTQDRAKPVTQIVSAEAWGRADCGFTSVSYQQGVLSATILYEILLGKATLYAVLVSALVLMAMVKRKDF

SEQ ID NO: 282 - protein, 272 aa, Homo sapiens
METLLGVSLVILWLQLARVNSQQGEEDPQALSIQEGENATMNCSYKTSINNLQWYRQNSGRGLVHLILIRSNEREKHSGRLRVTLDTSKKSSSLLITASRAADTASYFCATEGSSGYSTLTFGKGTMLLVSPDIQNPDPAVYQLRDSKSSDKSVCLFTDFDSQTNVSQSKDSDVYITDKTVLDMRSMDFKSNSAVAWSNKSDFACANAFNNSIIPEDTFFPSPESSCDVKLVEKSFETDTNLNFQNLSVIGFRILLLKVAGFNLLMTLRLWS

SEQ ID NO: 283 - protein, 310 aa, Homo sapiens
MSIGLLCCAALSLLWAGPVNAGVTQTPKFQVLKTGQSMTLQCAQDMNHEYMSWYRQDPGMGLRLIHYSVGAGITDQGEVPNGYNVSRSTTEDFPLRLLSAAPSQTSVYFCASSSQGAGGYGYTFGSGTRLTVVEDLNKVFPPEVAVFEPSEAEISHTQKATLVCLATGFFPDHVELSWWVNGKEVHSGVSTDPQPLKEQPALNDSRYCLSSRLRVSATFWQNPRNHFRCQVQFYGLSENDEWTQDRAKPVTQIVSAEAWGRADCGFTSVSYQQGVLSATILYEILLGKATLYAVLVSALVLMAMVKRKDF

SEQ ID NO: 284 - protein, 272 aa, Homo sapiens
MLLLLIPVLGMIFALRDARAQSVSQHNHHVILSEAASLELGCNYSYGGTVNLFWYVQYPGQHLQLLLKYFSGDPLVKGIKGFEAEFIKSKFSFNLRKPSVQWSDTAEYFCAVIFSGNTPLVFGKGTRLSVIANIQNPDPAVYQLRDSKSSDKSVCLFTDFDSQTNVSQSKDSDVYITDKTVLDMRSMDFKSNSAVAWSNKSDFACANAFNNSIIPEDTFFPSPESSCDVKLVEKSFETDTNLNFQNLSVIGFRILLLKVAGFNLLMTLRLWS

SEQ ID NO: 285 - protein, 309 aa, Homo sapiens
MGTRLLCWAALCLLGAELTEAGVAQSPRYKIIEKRQSVAFWCNPISGHATLYWYQQILGQGPKLLIQFQNNGVVDDSQLPKDRFSAERLKGVDSTLKIQPAKLEDSAVYLCASSLGGSTEAFFGQGTRLTVVEDLNKVFPPEVAVFEPSEAEISHTQKATLVCLATGFFPDHVELSWWVNGKEVHSGVSTDPQPLKEQPALNDSRYCLSSRLRVSATFWQNPRNHFRCQVQFYGLSENDEWTQDRAKPVTQIVSAEAWGRADCGFTSVSYQQGVLSATILYEILLGKATLYAVLVSALVLMAMVKRKDF

SEQ ID NO: 286 - protein, 276 aa, Homo sapiens
MSLSSLLKVVTASLWLGPGIAQKITQTQPGMFVQEKEAVTLDCTYDTSDPSYGLFWYKQPSSGEMIFLIYQGSYDQQNATEGRYSLNFQKARKSANLVISASQLGDSAMYFCAMRESGNAGNMLTFGGGTRLMVKPHIQNPDPAVYQLRDSKSSDKSVCLFTDFDSQTNVSQSKDSDVYITDKTVLDMRSMDFKSNSAVAWSNKSDFACANAFNNSIIPEDTFFPSPESSCDVKLVEKSFETDTNLNFQNLSVIGFRILLLKVAGFNLLMTLRLWS

SEQ ID NO: 287 - protein, 312 aa, Homo sapiens
MSIGLLCCVAFSLLWASPVNAGVTQTPKFQVLKTGQSMTLQCAQDMNHNSMYWYRQDPGMGLRLIYYSASEGTTDKGEVPNGYNVSRLNKREFSLRLESAAPSQTSVYFCASSVRDLSYNEQFFGPGTRLTVLEDLKNVFPPEVAVFEPSEAEISHTQKATLVCLATGFYPDHVELSWWVNGKEVHSGVSTDPQPLKEQPALNDSRYCLSSRLRVSATFWQNPRNHFRCQVQFYGLSENDEWTQDRAKPVTQIVSAEAWGRADCGFTSESYQQGVLSATILYEILLGKATLYAVLVSALVLMAMVKRKDSRG

SEQ ID NO: 288 - protein, 272 aa, Homo sapiens
MLLLLIPVLGMIFALRDARAQSVSQHNHHVILSEAASLELGCNYSYGGTVNLFWYVQYPGQHLQLLLKYFSGDPLVKGIKGFEAEFIKSKFSFNLRKPSVQWSDTAEYFCAVIYSGNTPLVFGKGTRLSVIANIQNPDPAVYQLRDSKSSDKSVCLFTDFDSQTNVSQSKDSDVYITDKTVLDMRSMDFKSNSAVAWSNKSDFACANAFNNSIIPEDTFFPSPESSCDVKLVEKSFETDTNLNFQNLSVIGFRILLLKVAGFNLLMTLRLWS

SEQ ID NO: 289 - protein, 308 aa, Homo sapiens
MGTRLLCWVAFCLLVEELIEAGVVQSPRYKIIEKKQPVAFWCNPISGHNTLYWYLQNLGQGPELLIRYENEEAVDDSQLPKDRFSAERLKGVDSTLKIQPAELGDSAVYLCASSLGGTEAFFGQGTRLTVVEDLNKVFPPEVAVFEPSEAEISHTQKATLVCLATGFFPDHVELSWWVNGKEVHSGVSTDPQPLKEQPALNDSRYCLSSRLRVSATFWQNPRNHFRCQVQFYGLSENDEWTQDRAKPVTQIVSAEAWGRADCGFTSVSYQQGVLSATILYEILLGKATLYAVLVSALVLMAMVKRKDF

SEQ ID NO: 290 - protein, 272 aa, Homo sapiens
MLLLLIPVLGMIFALRDARAQSVSQHNHHVILSEAASLELGCNYSYGGTVNLFWYVQYPGQHLQLLLKYFSGDPLVKGIKGFEAEFIKSKFSFNLRKPSVQWSDTAEYFCAGILSGNTPLVFGKGTRLSVIANIQNPDPAVYQLRDSKSSDKSVCLFTDFDSQTNVSQSKDSDVYITDKTVLDMRSMDFKSNSAVAWSNKSDFACANAFNNSIIPEDTFFPSPESSCDVKLVEKSFETDTNLNFQNLSVIGFRILLLKVAGFNLLMTLRLWS

SEQ ID NO: 291 - protein, 309 aa, Homo sapiens
MGTRLLCWAALCLLGAELTEAGVAQSPRYKIIEKRQSVAFWCNPISGHATLYWYQQILGQGPKLLIQFQNNGVVDDSQLPKDRFSAERLKGVDSTLKIQPAKLEDSAVYLCASSLAGSTEAFFGQGTRLTVVEDLNKVFPPEVAVFEPSEAEISHTQKATLVCLATGFFPDHVELSWWVNGKEVHSGVSTDPQPLKEQPALNDSRYCLSSRLRVSATFWQNPRNHFRCQVQFYGLSENDEWTQDRAKPVTQIVSAEAWGRADCGFTSVSYQQGVLSATILYEILLGKATLYAVLVSALVLMAMVKRKDF

SEQ ID NO: 292 - protein, 272 aa, Homo sapiens
MLLLLIPVLGMIFALRDARAQSVSQHNHHVILSEAASLELGCNYSYGGTVNLFWYVQYPGQHLQLLLKYFSGDPLVKGIKGFEAEFIKSKFSFNLRKPSVQWSDTAEYFCAVIPSGNTPLVFGKGTRLSVIANIQNPDPAVYQLRDSKSSDKSVCLFTDFDSQTNVSQSKDSDVYITDKTVLDMRSMDFKSNSAVAWSNKSDFACANAFNNSIIPEDTFFPSPESSCDVKLVEKSFETDTNLNFQNLSVIGFRILLLKVAGFNLLMTLRLWS

SEQ ID NO: 293 - protein, 268 aa, Homo sapiens
MRQVARVIVFLTLSTLSLAKTTQPISMDSYEGQEVNITCSHNNIATNDYITWYQQFPSQGPRFIIQGYKTKVTNEVASLFIPADRKSSTLSLPRVSLSDTAVYYCLVPRGGATNKLIFGTGTLLAVQPNIQNPDPAVYQLRDSKSSDKSVCLFTDFDSQTNVSQSKDSDVYITDKTVLDMRSMDFKSNSAVAWSNKSDFACANAFNNSIIPEDTFFPSPESSCDVKLVEKSFETDTNLNFQNLSVIGFRILLLKVAGFNLLMTLRLWS

SEQ ID NO: 294 - protein, 311 aa, Homo sapiens
MGTRLFFYVALCLLWAGHRDAEITQSPRHKITETGRQVTLACHQTWNHNNMFWYRQDLGHGLRLIHYSYGVQDTNKGEVSDGYSVSRSNTEDLPLTLESAASSQTSVYFCASSGTGGNNEQFFGPGTRLTVLEDLKNVFPPEVAVFEPSEAEISHTQKATLVCLATGFYPDHVELSWWVNGKEVHSGVSTDPQPLKEQPALNDSRYCLSSRLRVSATFWQNPRNHFRCQVQFYGLSENDEWTQDRAKPVTQIVSAEAWGRADCGFTSESYQQGVLSATILYEILLGKATLYAVLVSALVLMAMVKRKDSRG

SEQ ID NO: 295 - protein, 272 aa, Homo sapiens
MLLLLIPVLGMIFALRDARAQSVSQHNHHVILSEAASLELGCNYSYGGTVNLFWYVQYPGQHLQLLLKYFSGDPLVKGIKGFEAEFIKSKFSFNLRKPSVQWSDTAEYFCAAVYSGNTPLVFGKGTRLSVIANIQNPDPAVYQLRDSKSSDKSVCLFTDFDSQTNVSQSKDSDVYITDKTVLDMRSMDFKSNSAVAWSNKSDFACANAFNNSIIPEDTFFPSPESSCDVKLVEKSFETDTNLNFQNLSVIGFRILLLKVAGFNLLMTLRLWS

SEQ ID NO: 296 - protein, 274 aa, Homo sapiens
MLLLLIPVLGMIFALRDARAQSVSQHNHHVILSEAASLELGCNYSYGGTVNLFWYVQYPGQHLQLLLKYFSGDPLVKGIKGFEAEFIKSKFSFNLRKPSVQWSDTAEYFCAVNDLGNSGYALNFGKGTSLLVTPHIQNPDPAVYQLRDSKSSDKSVCLFTDFDSQTNVSQSKDSDVYITDKTVLDMRSMDFKSNSAVAWSNKSDFACANAFNNSIIPEDTFFPSPESSCDVKLVEKSFETDTNLNFQNLSVIGFRILLLKVAGFNLLMTLRLWS

SEQ ID NO: 297 - protein, 309 aa, Homo sapiens
MGTRLLCWAALCLLGAELTEAGVAQSPRYKIIEKRQSVAFWCNPISGHATLYWYQQILGQGPKLLIQFQNNGVVDDSQLPKDRFSAERLKGVDSTLKIQPAKLEDSAVYLCASSSTGGTEAFFGQGTRLTVVEDLNKVFPPEVAVFEPSEAEISHTQKATLVCLATGFFPDHVELSWWVNGKEVHSGVSTDPQPLKEQPALNDSRYCLSSRLRVSATFWQNPRNHFRCQVQFYGLSENDEWTQDRAKPVTQIVSAEAWGRADCGFTSVSYQQGVLSATILYEILLGKATLYAVLVSALVLMAMVKRKDF

SEQ ID NO: 298 - protein, 267 aa, Homo sapiens
MKLVTSITVLLSLGIMGDAKTTQPNSMESNEEEPVHLPCNHSTISGTDYIHWYRQLPSQGPEYVIHGLTSNVNNRMASLAIAEDRKSSTLILHRATLRDAAVYYCILLMDSNYQLIWGAGTKLIIKPDIQNPDPAVYQLRDSKSSDKSVCLFTDFDSQTNVSQSKDSDVYITDKTVLDMRSMDFKSNSAVAWSNKSDFACANAFNNSIIPEDTFFPSPESSCDVKLVEKSFETDTNLNFQNLSVIGFRILLLKVAGFNLLMTLRLWS

SEQ ID NO: 299 - protein, 314 aa, Homo sapiens
MGCRLLCCVVFCLLQAGPLDTAVSQTPKYLVTQMGNDKSIKCEQNLGHDTMYWYKQDSKKFLKIMFSYNNKELIINETVPNRFSPKSPDKAHLNLHINSLELGDSAVYFCASSQALMGASYNEQFFGPGTRLTVLEDLKNVFPPEVAVFEPSEAEISHTQKATLVCLATGFYPDHVELSWWVNGKEVHSGVSTDPQPLKEQPALNDSRYCLSSRLRVSATFWQNPRNHFRCQVQFYGLSENDEWTQDRAKPVTQIVSAEAWGRADCGFTSESYQQGVLSATILYEILLGKATLYAVLVSALVLMAMVKRKDSRG

SEQ ID NO: 300 - protein, 268 aa, Homo sapiens
MISLRVLLVILWLQLSWVWSQRKEVEQDPGPFNVPEGATVAFNCTYSNSASQSFFWYRQDCRKEPKLLMSVYSSGNEDGRFTAQLNRASQYISLLIRDSKLSDSATYLCVVKWGQLTFGSGTQLTVLPDIQNPDPAVYQLRDSKSSDKSVCLFTDFDSQTNVSQSKDSDVYITDKTVLDMRSMDFKSNSAVAWSNKSDFACANAFNNSIIPEDTFFPSPESSCDVKLVEKSFETDTNLNFQNLSVIGFRILLLKVAGFNLLMTLRLWS

SEQ ID NO: 301 - protein, 312 aa, Homo sapiens
MGSWTLCCVSLCILVAKHTDAGVIQSPRHEVTEMGQEVTLRCKPISGHDYLFWYRQTMMRGLELLIYFNNNVPIDDSGMPEDRFSAKMPNASFSTLKIQPSEPRDSAVYFCASSFFQTGGIEKLFFGSGTQLSVLEDLNKVFPPEVAVFEPSEAEISHTQKATLVCLATGFFPDHVELSWWVNGKEVHSGVSTDPQPLKEQPALNDSRYCLSSRLRVSATFWQNPRNHFRCQVQFYGLSENDEWTQDRAKPVTQIVSAEAWGRADCGFTSVSYQQGVLSATILYEILLGKATLYAVLVSALVLMAMVKRKDF

SEQ ID NO: 302 - protein, 273 aa, Homo sapiens
MKSLRVLLVILWLQLSWVWSQQKEVEQNSGPLSVPEGAIASLNCTYSDRGSQSFFWYRQYSGKSPELIMFIYSNGDKEDGRFTAQLNKASQYVSLLIRDSQPSDSATYLCAVYNAGNNRKLIWGLGTSLAVNPNIQNPDPAVYQLRDSKSSDKSVCLFTDFDSQTNVSQSKDSDVYITDKTVLDMRSMDFKSNSAVAWSNKSDFACANAFNNSIIPEDTFFPSPESSCDVKLVEKSFETDTNLNFQNLSVIGFRILLLKVAGFNLLMTLRLWS

SEQ ID NO: 303 - protein, 312 aa, Homo sapiens
MGTRLFFYVALCLLWTGHMDAGITQSPRHKVTETGTPVTLRCHQTENHRYMYWYRQDPGHGLRLIHYSYGVKDTDKGEVSDGYSVSRSKTEDFLLTLESATSSQTSVYFCATGGSTGEMETQYFGPGTRLLVLEDLKNVFPPEVAVFEPSEAEISHTQKATLVCLATGFYPDHVELSWWVNGKEVHSGVSTDPQPLKEQPALNDSRYCLSSRLRVSATFWQNPRNHFRCQVQFYGLSENDEWTQDRAKPVTQIVSAEAWGRADCGFTSESYQQGVLSATILYEILLGKATLYAVLVSALVLMAMVKRKDSRG

SEQ ID NO: 304 - protein, 270 aa, Homo sapiens
MALQSTLGAVWLGLLLNSLWKVAESKDQVFQPSTVASSEGAVVEIFCNHSVSNAYNFFWYLHFPGCAPRLLVKGSKPSQQGRYNMTYERFSSSLLILQVREADAAVYYCAVPSRGGKLIFGQGTELSVKPNIQNPDPAVYQLRDSKSSDKSVCLFTDFDSQTNVSQSKDSDVYITDKTVLDMRSMDFKSNSAVAWSNKSDFACANAFNNSIIPEDTFFPSPESSCDVKLVEKSFETDTNLNFQNLSVIGFRILLLKVAGFNLLMTLRLWS

SEQ ID NO: 305 - protein, 315 aa, Homo sapiens
MGCRLLCCAVLCLLGAVPIDTEVTQTPKHLVMGMTNKKSLKCEQHMGHRAMYWYKQKAKKPPELMFVYSYEKLSINESVPSRFSPECPNSSLLNLHLHALQPEDSALYLCASSQVVADPSSSYEQYFGPGTRLTVTEDLKNVFPPEVAVFEPSEAEISHTQKATLVCLATGFYPDHVELSWWVNGKEVHSGVSTDPQPLKEQPALNDSRYCLSSRLRVSATFWQNPRNHFRCQVQFYGLSENDEWTQDRAKPVTQIVSAEAWGRADCGFTSESYQQGVLSATILYEILLGKATLYAVLVSALVLMAMVKRKDSRG

SEQ ID NO: 306 - protein, 275 aa, Homo sapiens
MLTASLLRAVIASICVVSSMAQKVTQAQTEISVVEKEDVTLDCVYETRDTTYYLFWYKQPPSGELVFLIRRNSFDEQNEISGRYSWNFQKSTSSFNFTITASQVVDSAVYFCALSEGGYGNKLVFGAGTILRVKSYIQNPDPAVYQLRDSKSSDKSVCLFTDFDSQTNVSQSKDSDVYITDKTVLDMRSMDFKSNSAVAWSNKSDFACANAFNNSIIPEDTFFPSPESSCDVKLVEKSFETDTNLNFQNLSVIGFRILLLKVAGFNLLMTLRLWS

SEQ ID NO: 307 - protein, 313 aa, Homo sapiens
MGCRLLCCAVLCLLGAVPIDTEVTQTPKHLVMGMTNKKSLKCEQHMGHRAMYWYKQKAKKPPELMFVYSYEKLSINESVPSRFSPECPNSSLLNLHLHALQPEDSALYLCASSQAPQASNYEQYFGPGTRLTVTEDLKNVFPPEVAVFEPSEAEISHTQKATLVCLATGFYPDHVELSWWVNGKEVHSGVSTDPQPLKEQPALNDSRYCLSSRLRVSATFWQNPRNHFRCQVQFYGLSENDEWTQDRAKPVTQIVSAEAWGRADCGFTSESYQQGVLSATILYEILLGKATLYAVLVSALVLMAMVKRKDSRG

SEQ ID NO: 308 - protein, 272 aa, Homo sapiens
MLLLLIPVLGMIFALRDARAQSVSQHNHHVILSEAASLELGCNYSYGGTVNLFWYVQYPGQHLQLLLKYFSGDPLVKGIKGFEAEFIKSKFSFNLRKPSVQWSDTAEYFCAVIRSGNTPLVFGKGTRLSVIANIQNPDPAVYQLRDSKSSDKSVCLFTDFDSQTNVSQSKDSDVYITDKTVLDMRSMDFKSNSAVAWSNKSDFACANAFNNSIIPEDTFFPSPESSCDVKLVEKSFETDTNLNFQNLSVIGFRILLLKVAGFNLLMTLRLWS

SEQ ID NO: 309 - protein, 308 aa, Homo sapiens
MGTRLLCWVAFCLLVEELIEAGVVQSPRYKIIEKKQPVAFWCNPISGHNTLYWYLQNLGQGPELLIRYENEEAVDDSQLPKDRFSAERLKGVDSTLKIQPAELGDSAVYLCASSLGGSEAFFGQGTRLTVVEDLNKVFPPEVAVFEPSEAEISHTQKATLVCLATGFFPDHVELSWWVNGKEVHSGVSTDPQPLKEQPALNDSRYCLSSRLRVSATFWQNPRNHFRCQVQFYGLSENDEWTQDRAKPVTQIVSAEAWGRADCGFTSVSYQQGVLSATILYEILLGKATLYAVLVSALVLMAMVKRKDF

SEQ ID NO: 310 - protein, 277 aa, Homo sapiens
MTRVSLLWAVVVSTCLESGMAQTVTQSQPEMSVQEAETVTLSCTYDTSENNYYLFWYKQPPSRQMILVIRQEAYKQQNATENRFSVNFQKAAKSFSLKISDSQLGDTAMYFCAFMNPLAGGYQKVTFGIGTKLQVIPNIQNPDPAVYQLRDSKSSDKSVCLFTDFDSQTNVSQSKDSDVYITDKTVLDMRSMDFKSNSAVAWSNKSDFACANAFNNSIIPEDTFFPSPESSCDVKLVEKSFETDTNLNFQNLSVIGFRILLLKVAGFNLLMTLRLWS

SEQ ID NO: 311 - protein, 314 aa, Homo sapiens
MGCRLLCCVVFCLLQAGPLDTAVSQTPKYLVTQMGNDKSIKCEQNLGHDTMYWYKQDSKKFLKIMFSYNNKELIINETVPNRFSPKSPDKAHLNLHINSLELGDSAVYFCASSQGSPRTVQETQYFGPGTRLLVLEDLKNVFPPEVAVFEPSEAEISHTQKATLVCLATGFYPDHVELSWWVNGKEVHSGVSTDPQPLKEQPALNDSRYCLSSRLRVSATFWQNPRNHFRCQVQFYGLSENDEWTQDRAKPVTQIVSAEAWGRADCGFTSESYQQGVLSATILYEILLGKATLYAVLVSALVLMAMVKRKDSRG

SEQ ID NO: 312 - protein, 272 aa, Homo sapiens
MLLLLIPVLGMIFALRDARAQSVSQHNHHVILSEAASLELGCNYSYGGTVNLFWYVQYPGQHLQLLLKYFSGDPLVKGIKGFEAEFIKSKFSFNLRKPSVQWSDTAEYFCAVILSGNTPLVFGKGTRLSVIANIQNPDPAVYQLRDSKSSDKSVCLFTDFDSQTNVSQSKDSDVYITDKTVLDMRSMDFKSNSAVAWSNKSDFACANAFNNSIIPEDTFFPSPESSCDVKLVEKSFETDTNLNFQNLSVIGFRILLLKVAGFNLLMTLRLWS

SEQ ID NO: 313 - protein, 308 aa, Homo sapiens
MGTRLLCWVAFCLLVEELIEAGVVQSPRYKIIEKKQPVAFWCNPISGHNTLYWYLQNLGQGPELLIRYENEEAVDDSQLPKDRFSAERLKGVDSTLKIQPAELGDSAVYLCASSLGGAEAFFGQGTRLTVVEDLNKVFPPEVAVFEPSEAEISHTQKATLVCLATGFFPDHVELSWWVNGKEVHSGVSTDPQPLKEQPALNDSRYCLSSRLRVSATFWQNPRNHFRCQVQFYGLSENDEWTQDRAKPVTQIVSAEAWGRADCGFTSVSYQQGVLSATILYEILLGKATLYAVLVSALVLMAMVKRKDF

SEQ ID NO: 314 - protein, 270 aa, Homo sapiens
MLLEHLLIILWMQLTWVSGQQLNQSPQSMFIQEGEDVSMNCTSSSIFNTWLWYKQEPGEGPVLLIALYKAGELTSNGRLTAQFGITRKDSFLNISASIPSDVGIYFCAGPADRGNEKLTFGTGTRLTIIPNIQNPDPAVYQLRDSKSSDKSVCLFTDFDSQTNVSQSKDSDVYITDKTVLDMRSMDFKSNSAVAWSNKSDFACANAFNNSIIPEDTFFPSPESSCDVKLVEKSFETDTNLNFQNLSVIGFRILLLKVAGFNLLMTLRLWS

SEQ ID NO: 315 - protein, 309 aa, Homo sapiens
MSIGLLCCAALSLLWAGPVNAGVTQTPKFQVLKTGQSMTLQCAQDMNHEYMSWYRQDPGMGLRLIHYSVGAGITDQGEVPNGYNVSRSTTEDFPLRLLSAAPSQTSVYFCASSLIPGANEAFFGQGTRLTVVEDLNKVFPPEVAVFEPSEAEISHTQKATLVCLATGFFPDHVELSWWVNGKEVHSGVSTDPQPLKEQPALNDSRYCLSSRLRVSATFWQNPRNHFRCQVQFYGLSENDEWTQDRAKPVTQIVSAEAWGRADCGFTSVSYQQGVLSATILYEILLGKATLYAVLVSALVLMAMVKRKDF

SEQ ID NO: 316 - protein, 274 aa, Homo sapiens
MLLLLIPVLGMIFALRDARAQSVSQHNHHVILSEAASLELGCNYSYGGTVNLFWYVQYPGQHLQLLLKYFSGDPLVKGIKGFEAEFIKSKFSFNLRKPSVQWSDTAEYFCAVNALITAGNKLTFGGGTRVLVKPNIQNPDPAVYQLRDSKSSDKSVCLFTDFDSQTNVSQSKDSDVYITDKTVLDMRSMDFKSNSAVAWSNKSDFACANAFNNSIIPEDTFFPSPESSCDVKLVEKSFETDTNLNFQNLSVIGFRILLLKVAGFNLLMTLRLWS

SEQ ID NO: 317 - protein, 306 aa, Homo sapiens
MSIGLLCCVAFSLLWASPVNAGVTQTPKFQVLKTGQSMTLQCAQDMNHNSMYWYRQDPGMGLRLIYYSASEGTTDKGEVPNGYNVSRLNKREFSLRLESAAPSQTSVYFCASRENTEAFFGQGTRLTVVEDLNKVFPPEVAVFEPSEAEISHTQKATLVCLATGFFPDHVELSWWVNGKEVHSGVSTDPQPLKEQPALNDSRYCLSSRLRVSATFWQNPRNHFRCQVQFYGLSENDEWTQDRAKPVTQIVSAEAWGRADCGFTSVSYQQGVLSATILYEILLGKATLYAVLVSALVLMAMVKRKDF

SEQ ID NO: 318 - protein, 278 aa, Homo sapiens
MSLSSLLKVVTASLWLGPGIAQKITQTQPGMFVQEKEAVTLDCTYDTSDPSYGLFWYKQPSSGEMIFLIYQGSYDQQNATEGRYSLNFQKARKSANLVISASQLGDSAMYFCAMRVTYSGAGSYQLTFGKGTKLSVIPNIQNPDPAVYQLRDSKSSDKSVCLFTDFDSQTNVSQSKDSDVYITDKTVLDMRSMDFKSNSAVAWSNKSDFACANAFNNSIIPEDTFFPSPESSCDVKLVEKSFETDTNLNFQNLSVIGFRILLLKVAGFNLLMTLRLWS

SEQ ID NO: 319 - protein, 308 aa, Homo sapiens
MGTRLLCWAALCLLGAELTEAGVAQSPRYKIIEKRQSVAFWCNPISGHATLYWYQQILGQGPKLLIQFQNNGVVDDSQLPKDRFSAERLKGVDSTLKIQPAKLEDSAVYLCASSLGSSEAFFGQGTRLTVVEDLNKVFPPEVAVFEPSEAEISHTQKATLVCLATGFFPDHVELSWWVNGKEVHSGVSTDPQPLKEQPALNDSRYCLSSRLRVSATFWQNPRNHFRCQVQFYGLSENDEWTQDRAKPVTQIVSAEAWGRADCGFTSVSYQQGVLSATILYEILLGKATLYAVLVSALVLMAMVKRKDF

SEQ ID NO: 320 - protein, 278 aa, Homo sapiens
MLLLLVPAFQVIFTLGGTRAQSVTQLDSQVPVFEEAPVELRCNYSSSVSVYLFWYVQYPNQGLQLLLKYLSGSTLVESINGFEAEFNKSQTSFHLRKPSVHISDTAEYFCAVSDRVGFYGGSQGNLIFGKGTKLSVKPNIQNPDPAVYQLRDSKSSDKSVCLFTDFDSQTNVSQSKDSDVYITDKTVLDMRSMDFKSNSAVAWSNKSDFACANAFNNSIIPEDTFFPSPESSCDVKLVEKSFETDTNLNFQNLSVIGFRILLLKVAGFNLLMTLRLWS

SEQ ID NO: 321 - protein, 315 aa, Homo sapiens
MSIGLLCCVAFSLLWASPVNAGVTQTPKFQVLKTGQSMTLQCAQDMNHNSMYWYRQDPGMGLRLIYYSASEGTTDKGEVPNGYNVSRLNKREFSLRLESAAPSQTSVYFCASSERDKIHSGANVLTFGAGSRLTVLEDLKNVFPPEVAVFEPSEAEISHTQKATLVCLATGFYPDHVELSWWVNGKEVHSGVSTDPQPLKEQPALNDSRYCLSSRLRVSATFWQNPRNHFRCQVQFYGLSENDEWTQDRAKPVTQIVSAEAWGRADCGFTSESYQQGVLSATILYEILLGKATLYAVLVSALVLMAMVKRKDSRG

SEQ ID NO: 322 - protein, 272 aa, Homo sapiens
MKSLRVLLVILWLQLSWVWSQQKEVEQNSGPLSVPEGAIASLNCTYSDRGSQSFFWYRQYSGKSPELIMFIYSNGDKEDGRFTAQLNKASQYVSLLIRDSQPSDSATYLCASNSNSGYALNFGKGTSLLVTPHIQNPDPAVYQLRDSKSSDKSVCLFTDFDSQTNVSQSKDSDVYITDKTVLDMRSMDFKSNSAVAWSNKSDFACANAFNNSIIPEDTFFPSPESSCDVKLVEKSFETDTNLNFQNLSVIGFRILLLKVAGFNLLMTLRLWS

SEQ ID NO: 323 - protein, 311 aa, Homo sapiens
MDTWLVCWAIFSLLKAGLTEPEVTQTPSHQVTQMGQEVILRCVPISNHLYFYWYRQILGQKVEFLVSFYNNEISEKSEIFDDQFSVERPDGSNFTLKIRSTKLEDSAMYFCASGIQGAYEQYFGPGTRLTVTEDLKNVFPPEVAVFEPSEAEISHTQKATLVCLATGFYPDHVELSWWVNGKEVHSGVSTDPQPLKEQPALNDSRYCLSSRLRVSATFWQNPRNHFRCQVQFYGLSENDEWTQDRAKPVTQIVSAEAWGRADCGFTSESYQQGVLSATILYEILLGKATLYAVLVSALVLMAMVKRKDSRG

SEQ ID NO: 324 - protein, 272 aa, Homo sapiens
MLLLLIPVLGMIFALRDARAQSVSQHNHHVILSEAASLELGCNYSYGGTVNLFWYVQYPGQHLQLLLKYFSGDPLVKGIKGFEAEFIKSKFSFNLRKPSVQWSDTAEYFCAGVKAGNTPLVFGKGTRLSVIANIQNPDPAVYQLRDSKSSDKSVCLFTDFDSQTNVSQSKDSDVYITDKTVLDMRSMDFKSNSAVAWSNKSDFACANAFNNSIIPEDTFFPSPESSCDVKLVEKSFETDTNLNFQNLSVIGFRILLLKVAGFNLLMTLRLWS

SEQ ID NO: 325 - protein, 308 aa, Homo sapiens
MGTRLLCWAALCLLGAELTEAGVAQSPRYKIIEKRQSVAFWCNPISGHATLYWYQQILGQGPKLLIQFQNNGVVDDSQLPKDRFSAERLKGVDSTLKIQPAKLEDSAVYLCASSLGGSEAFFGQGTRLTVVEDLNKVFPPEVAVFEPSEAEISHTQKATLVCLATGFFPDHVELSWWVNGKEVHSGVSTDPQPLKEQPALNDSRYCLSSRLRVSATFWQNPRNHFRCQVQFYGLSENDEWTQDRAKPVTQIVSAEAWGRADCGFTSVSYQQGVLSATILYEILLGKATLYAVLVSALVLMAMVKRKDF

SEQ ID NO: 326 - protein, 270 aa, Homo sapiens
MMKSLRVLLVILWLQLSWVWSQQKEVEQDPGPLSVPEGAIVSLNCTYSNSAFQYFMWYRQYSRKGPELLMYTYSSGNKEDGRFTAQVDKSSKYISLFIRDSQPSDSATYLCAMLSDKLSFGAGTTVTVRANIQNPDPAVYQLRDSKSSDKSVCLFTDFDSQTNVSQSKDSDVYITDKTVLDMRSMDFKSNSAVAWSNKSDFACANAFNNSIIPEDTFFPSPESSCDVKLVEKSFETDTNLNFQNLSVIGFRILLLKVAGFNLLMTLRLWS

SEQ ID NO: 327 - protein, 310 aa, Homo sapiens
MGFRLLCCVAFCLLGAGPVDSGVTQTPKHLITATGQRVTLRCSPRSGDLSVYWYQQSLDQGLQFLIQYYNGEERAKGNILERFSAQQFPDLHSELNLSSLELGDSALYFCASSGSGTGNTEAFFGQGTRLTVVEDLNKVFPPEVAVFEPSEAEISHTQKATLVCLATGFFPDHVELSWWVNGKEVHSGVSTDPQPLKEQPALNDSRYCLSSRLRVSATFWQNPRNHFRCQVQFYGLSENDEWTQDRAKPVTQIVSAEAWGRADCGFTSVSYQQGVLSATILYEILLGKATLYAVLVSALVLMAMVKRKDF

SEQ ID NO: 328 - protein, 272 aa, Homo sapiens
MLLLLIPVLGMIFALRDARAQSVSQHNHHVILSEAASLELGCNYSYGGTVNLFWYVQYPGQHLQLLLKYFSGDPLVKGIKGFEAEFIKSKFSFNLRKPSVQWSDTAEYFCAVIVSGNTPLVFGKGTRLSVIANIQNPDPAVYQLRDSKSSDKSVCLFTDFDSQTNVSQSKDSDVYITDKTVLDMRSMDFKSNSAVAWSNKSDFACANAFNNSIIPEDTFFPSPESSCDVKLVEKSFETDTNLNFQNLSVIGFRILLLKVAGFNLLMTLRLWS

SEQ ID NO: 329 - protein, 11 aa, Severe acute respiratory syndrome coronavirus 2
YLFDESGEFKL

SEQ ID NO: 330 - protein, 274 aa, Homo sapiens
MASAPISMLAMLFTLSGLRAQSVAQPEDQVNVAEGNPLTVKCTYSVSGNPYLFWYVQYPNRGLQFLLKYITGDNLVKGSYGFEAEFNKSQTSFHLKKPSALVSDSALYFCAVRDIKAAGNKLTFGGGTRVLVKPNIQNPDPAVYQLRDSKSSDKSVCLFTDFDSQTNVSQSKDSDVYITDKTVLDMRSMDFKSNSAVAWSNKSDFACANAFNNSIIPEDTFFPSPESSCDVKLVEKSFETDTNLNFQNLSVIGFRILLLKVAGFNLLMTLRLWS

SEQ ID NO: 331 - protein, 319 aa, Homo sapiens
MLSPDLPDSAWNTRLLCHVMLCLLGAVSVAAGVIQSPRHLIKEKRETATLKCYPIPRHDTVYWYQQGPGQDPQFLISFYEKMQSDKGSIPDRFSAQQFSDYHSELNMSSLELGDSALYFCASSFQGRGTEAFFGQGTRLTVVEDLNKVFPPEVAVFEPSEAEISHTQKATLVCLATGFFPDHVELSWWVNGKEVHSGVSTDPQPLKEQPALNDSRYCLSSRLRVSATFWQNPRNHFRCQVQFYGLSENDEWTQDRAKPVTQIVSAEAWGRADCGFTSVSYQQGVLSATILYEILLGKATLYAVLVSALVLMAMVKRKDF

SEQ ID NO: 332 - protein, 273 aa, Homo sapiens
MLLLLIPVLGMIFALRDARAQSVSQHNHHVILSEAASLELGCNYSYGGTVNLFWYVQYPGQHLQLLLKYFSGDPLVKGIKGFEAEFIKSKFSFNLRKPSVQWSDTAEYFCAVNQPGNNARLMFGDGTQLVVKPNIQNPDPAVYQLRDSKSSDKSVCLFTDFDSQTNVSQSKDSDVYITDKTVLDMRSMDFKSNSAVAWSNKSDFACANAFNNSIIPEDTFFPSPESSCDVKLVEKSFETDTNLNFQNLSVIGFRILLLKVAGFNLLMTLRLWS

SEQ ID NO: 333 - protein, 308 aa, Homo sapiens
MASLLFFCGAFYLLGTGSMDADVTQTPRNRITKTGKRIMLECSQTKGHDRMYWYRQDPGLGLRLIYYSFDVKDINKGEISDGYSVSRQAQAKFSLSLESAIPNQTALYFCATGLAGEQYFGPGTRLTVTEDLKNVFPPEVAVFEPSEAEISHTQKATLVCLATGFYPDHVELSWWVNGKEVHSGVSTDPQPLKEQPALNDSRYCLSSRLRVSATFWQNPRNHFRCQVQFYGLSENDEWTQDRAKPVTQIVSAEAWGRADCGFTSESYQQGVLSATILYEILLGKATLYAVLVSALVLMAMVKRKDSRG

SEQ ID NO: 334 - protein, 276 aa, Homo sapiens
MAMLLGASVLILWLQPDWVNSQQKNDDQQVKQNSPSLSVQEGRISILNCDYTNSMFDYFLWYKKYPAEGPTFLISISSIKDKNEDGRFTVFLNKSAKHLSLHIVPSQPGDSAVYFCAAYHAGKSTFGDGTTLTVKPNIQNPDPAVYQLRDSKSSDKSVCLFTDFDSQTNVSQSKDSDVYITDKTVLDMRSMDFKSNSAVAWSNKSDFACANAFNNSIIPEDTFFPSPESSCDVKLVEKSFETDTNLNFQNLSVIGFRILLLKVAGFNLLMTLRLWS

SEQ ID NO: 335 - protein, 314 aa, Homo sapiens
MGTSLLCWMALCLLGADHADTGVSQNPRHKITKRGQNVTFRCDPISEHNRLYWYRQTLGQGPEFLTYFQNEAQLEKSRLLSDRFSAERPKGSFSTLEIQRTEQGDSAMYLCASSSPMTGAKDEQFFGPGTRLTVLEDLKNVFPPEVAVFEPSEAEISHTQKATLVCLATGFYPDHVELSWWVNGKEVHSGVSTDPQPLKEQPALNDSRYCLSSRLRVSATFWQNPRNHFRCQVQFYGLSENDEWTQDRAKPVTQIVSAEAWGRADCGFTSESYQQGVLSATILYEILLGKATLYAVLVSALVLMAMVKRKDSRG

SEQ ID NO: 336 - protein, 273 aa, Homo sapiens
MASAPISMLAMLFTLSGLRAQSVAQPEDQVNVAEGNPLTVKCTYSVSGNPYLFWYVQYPNRGLQFLLKYITGDNLVKGSYGFEAEFNKSQTSFHLKKPSALVSDSALYFCAVRDFGTGNQFYFGTGTSLTVIPNIQNPDPAVYQLRDSKSSDKSVCLFTDFDSQTNVSQSKDSDVYITDKTVLDMRSMDFKSNSAVAWSNKSDFACANAFNNSIIPEDTFFPSPESSCDVKLVEKSFETDTNLNFQNLSVIGFRILLLKVAGFNLLMTLRLWS

SEQ ID NO: 337 - protein, 306 aa, Homo sapiens
MLCSLLALLLGTFFGVRSQTIHQWPATLVQPVGSPLSLECTVEGTSNPNLYWYRQAAGRGLQLLFYSVGIGQISSEVPQNLSASRPQDRQFILSSKKLLLSDSGFYLCAWSRGNEQFFGPGTRLTVLEDLKNVFPPEVAVFEPSEAEISHTQKATLVCLATGFYPDHVELSWWVNGKEVHSGVSTDPQPLKEQPALNDSRYCLSSRLRVSATFWQNPRNHFRCQVQFYGLSENDEWTQDRAKPVTQIVSAEAWGRADCGFTSESYQQGVLSATILYEILLGKATLYAVLVSALVLMAMVKRKDSRG

SEQ ID NO: 338 - protein, 273 aa, Homo sapiens
MTRVSLLWAVVVSTCLESGMAQTVTQSQPEMSVQEAETVTLSCTYDTSENNYYLFWYKQPPSRQMILVIRQEAYKQQNATENRFSVNFQKAAKSFSLKISDSQLGDTAMYFCAFGGANSKLTFGKGITLSVRPDIQNPDPAVYQLRDSKSSDKSVCLFTDFDSQTNVSQSKDSDVYITDKTVLDMRSMDFKSNSAVAWSNKSDFACANAFNNSIIPEDTFFPSPESSCDVKLVEKSFETDTNLNFQNLSVIGFRILLLKVAGFNLLMTLRLWS

SEQ ID NO: 339 - protein, 318 aa, Homo sapiens
MGTSLLCWMALCLLGADHADTGVSQNPRHKITKRGQNVTFRCDPISEHNRLYWYRQTLGQGPEFLTYFQNEAQLEKSRLLSDRFSAERPKGSFSTLEIQRTEQGDSAMYLCASSLAKAGNAGALYNEQFFGPGTRLTVLEDLKNVFPPEVAVFEPSEAEISHTQKATLVCLATGFYPDHVELSWWVNGKEVHSGVSTDPQPLKEQPALNDSRYCLSSRLRVSATFWQNPRNHFRCQVQFYGLSENDEWTQDRAKPVTQIVSAEAWGRADCGFTSESYQQGVLSATILYEILLGKATLYAVLVSALVLMAMVKRKDSRG

SEQ ID NO: 340 - protein, 272 aa, Homo sapiens
METLLGVSLVILWLQLARVNSQQGEEDPQALSIQEGENATMNCSYKTSINNLQWYRQNSGRGLVHLILIRSNEREKHSGRLRVTLDTSKKSSSLLITASRAADTASYFCATELYNAGNMLTFGGGTRLMVKPHIQNPDPAVYQLRDSKSSDKSVCLFTDFDSQTNVSQSKDSDVYITDKTVLDMRSMDFKSNSAVAWSNKSDFACANAFNNSIIPEDTFFPSPESSCDVKLVEKSFETDTNLNFQNLSVIGFRILLLKVAGFNLLMTLRLWS

SEQ ID NO: 341 - protein, 308 aa, Homo sapiens
MGSRLLCWVLLCLLGAGPVKAGVTQTPRYLIKTRGQQVTLSCSPISGHRSVSWYQQTPGQGLQFLFEYFSETQRNKGNFPGRFSGRQFSNSRSEMNVSTLELGDSALYLCASSWYGTDEAFFGQGTRLTVVEDLNKVFPPEVAVFEPSEAEISHTQKATLVCLATGFFPDHVELSWWVNGKEVHSGVSTDPQPLKEQPALNDSRYCLSSRLRVSATFWQNPRNHFRCQVQFYGLSENDEWTQDRAKPVTQIVSAEAWGRADCGFTSVSYQQGVLSATILYEILLGKATLYAVLVSALVLMAMVKRKDF

SEQ ID NO: 342 - protein, 269 aa, Homo sapiens
MISLRVLLVILWLQLSWVWSQRKEVEQDPGPFNVPEGATVAFNCTYSNSASQSFFWYRQDCRKEPKLLMSVYSSGNEDGRFTAQLNRASQYISLLIRDSKLSDSATYLCVVNRHNDMRFGAGTRLTVKPNIQNPDPAVYQLRDSKSSDKSVCLFTDFDSQTNVSQSKDSDVYITDKTVLDMRSMDFKSNSAVAWSNKSDFACANAFNNSIIPEDTFFPSPESSCDVKLVEKSFETDTNLNFQNLSVIGFRILLLKVAGFNLLMTLRLWS

SEQ ID NO: 343 - protein, 308 aa, Homo sapiens
MLCSLLALLLGTFFGVRSQTIHQWPATLVQPVGSPLSLECTVEGTSNPNLYWYRQAAGRGLQLLFYSVGIGQISSEVPQNLSASRPQDRQFILSSKKLLLSDSGFYLCALQGLDTGELFFGEGSRLTVLEDLKNVFPPEVAVFEPSEAEISHTQKATLVCLATGFYPDHVELSWWVNGKEVHSGVSTDPQPLKEQPALNDSRYCLSSRLRVSATFWQNPRNHFRCQVQFYGLSENDEWTQDRAKPVTQIVSAEAWGRADCGFTSESYQQGVLSATILYEILLGKATLYAVLVSALVLMAMVKRKDSRG

SEQ ID NO: 344 - protein, 275 aa, Homo sapiens
MVKIRQFLLAILWLQLSCVSAAKNEVEQSPQNLTAQEGEFITINCSYSVGISALHWLQQHPGGGIVSLFMLSSGKKKHGRLIATINIQEKHSSLHITASHPRDSAVYICAAYDSYSGGGADGLTFGKGTHLIIQPYIQNPDPAVYQLRDSKSSDKSVCLFTDFDSQTNVSQSKDSDVYITDKTVLDMRSMDFKSNSAVAWSNKSDFACANAFNNSIIPEDTFFPSPESSCDVKLVEKSFETDTNLNFQNLSVIGFRILLLKVAGFNLLMTLRLWS

SEQ ID NO: 345 - protein, 312 aa, Homo sapiens
MGPQLLGYVVLCLLGAGPLEAQVTQNPRYLITVTGKKLTVTCSQNMNHEYMSWYRQDPGLGLRQIYYSMNVEVTDKGDVPEGYKVSRKEKRNFPLILESPSPNQTSLYFCASSSTGPPYNEQFFGPGTRLTVLEDLKNVFPPEVAVFEPSEAEISHTQKATLVCLATGFYPDHVELSWWVNGKEVHSGVSTDPQPLKEQPALNDSRYCLSSRLRVSATFWQNPRNHFRCQVQFYGLSENDEWTQDRAKPVTQIVSAEAWGRADCGFTSESYQQGVLSATILYEILLGKATLYAVLVSALVLMAMVKRKDSRG

SEQ ID NO: 346 - protein, 321 aa, Homo sapiens
MLSPDLPDSAWNTRLLCHVMLCLLGAVSVAAGVIQSPRHLIKEKRETATLKCYPIPRHDTVYWYQQGPGQDPQFLISFYEKMQSDKGSIPDRFSAQQFSDYHSELNMSSLELGDSALYFCASSLGGRAGELFFGEGSRLTVLEDLKNVFPPEVAVFEPSEAEISHTQKATLVCLATGFYPDHVELSWWVNGKEVHSGVSTDPQPLKEQPALNDSRYCLSSRLRVSATFWQNPRNHFRCQVQFYGLSENDEWTQDRAKPVTQIVSAEAWGRADCGFTSESYQQGVLSATILYEILLGKATLYAVLVSALVLMAMVKRKDSRG

SEQ ID NO: 347 - protein, 273 aa, Homo sapiens
MTSIRAVFIFLWLQLDLVNGENVEQHPSTLSVQEGDSAVIKCTYSDSASNYFPWYKQELGKGPQLIIDIRSNVGEKKDQRIAVTLNKTAKHFSLHITETQPEDSAVYFCAAIITGGGNKLTFGTGTQLKVELNIIQNPDPAVYQLRDSKSSDKSVCLFTDFDSQTNVSQSKDSDVYITDKTVLDMRSMDFKSNSAVAWSNKSDFACANAFNNSIIPEDTFFPSPESSCDVKLVEKSFETDTNLNFQNLSVIGFRILLLKVAGFNLLMTLRLWS

SEQ ID NO: 348 - protein, 312 aa, Homo sapiens
MGPQLLGYVVLCLLGAGPLEAQVTQNPRYLITVTGKKLTVTCSQNMNHEYMSWYRQDPGLGLRQIYYSMNVEVTDKGDVPEGYKVSRKEKRNFPLILESPSPNQTSLYFCASSLYSTGAYEQYFGPGTRLTVTEDLKNVFPPEVAVFEPSEAEISHTQKATLVCLATGFYPDHVELSWWVNGKEVHSGVSTDPQPLKEQPALNDSRYCLSSRLRVSATFWQNPRNHFRCQVQFYGLSENDEWTQDRAKPVTQIVSAEAWGRADCGFTSESYQQGVLSATILYEILLGKATLYAVLVSALVLMAMVKRKDSRG

SEQ ID NO: 349 - protein, 273 aa, Homo sapiens
MEKMLECAFIVLWLQLGWLSGEDQVTQSPEALRLQEGESSSLNCSYTVSGLRGLFWYRQDPGKGPEFLFTLYSAGEEKEKERLKATLTKKESFLHITAPKPEDSATYLCAVPHSKAAGNKLTFGGGTRVLVKPNIQNPDPAVYQLRDSKSSDKSVCLFTDFDSQTNVSQSKDSDVYITDKTVLDMRSMDFKSNSAVAWSNKSDFACANAFNNSIIPEDTFFPSPESSCDVKLVEKSFETDTNLNFQNLSVIGFRILLLKVAGFNLLMTLRLWS

SEQ ID NO: 350 - protein, 312 aa, Homo sapiens
MGPQLLGYVVLCLLGAGPLEAQVTQNPRYLITVTGKKLTVTCSQNMNHEYMSWYRQDPGLGLRQIYYSMNVEVTDKGDVPEGYKVSRKEKRNFPLILESPSPNQTSLYFCASSFLGTDEETQYFGPGTRLLVLEDLKNVFPPEVAVFEPSEAEISHTQKATLVCLATGFYPDHVELSWWVNGKEVHSGVSTDPQPLKEQPALNDSRYCLSSRLRVSATFWQNPRNHFRCQVQFYGLSENDEWTQDRAKPVTQIVSAEAWGRADCGFTSESYQQGVLSATILYEILLGKATLYAVLVSALVLMAMVKRKDSRG

SEQ ID NO: 351 - protein, 276 aa, Homo sapiens
MLTASLLRAVIASICVVSSMAQKVTQAQTEISVVEKEDVTLDCVYETRDTTYYLFWYKQPPSGELVFLIRRNSFDEQNEISGRYSWNFQKSTSSFNFTITASQVVDSAVYFCALIITSGTYKYIFGTGTRLKVLANIIQNPDPAVYQLRDSKSSDKSVCLFTDFDSQTNVSQSKDSDVYITDKTVLDMRSMDFKSNSAVAWSNKSDFACANAFNNSIIPEDTFFPSPESSCDVKLVEKSFETDTNLNFQNLSVIGFRILLLKVAGFNLLMTLRLWS

SEQ ID NO: 352 - protein, 309 aa, Homo sapiens
MGFRLLCCVAFCLLGAGPVDSGVTQTPKHLITATGQRVTLRCSPRSGDLSVYWYQQSLDQGLQFLIQYYNGEERAKGNILERFSAQQFPDLHSELNLSSLELGDSALYFCASSVEQGNNGYTFGSGTRLTVVEDLNKVFPPEVAVFEPSEAEISHTQKATLVCLATGFFPDHVELSWWVNGKEVHSGVSTDPQPLKEQPALNDSRYCLSSRLRVSATFWQNPRNHFRCQVQFYGLSENDEWTQDRAKPVTQIVSAEAWGRADCGFTSVSYQQGVLSATILYEILLGKATLYAVLVSALVLMAMVKRKDF

SEQ ID NO: 353 - protein, 269 aa, Homo sapiens
MKSLRVLLVILWLQLSWVWSQQKEVEQNSGPLSVPEGAIASLNCTYSDRGSQSFFWYRQYSGKSPELIMFIYSNGDKEDGRFTAQLNKASQYVSLLIRDSQPSDSATYLCAVREDKLVFGAGTILRVKSYIQNPDPAVYQLRDSKSSDKSVCLFTDFDSQTNVSQSKDSDVYITDKTVLDMRSMDFKSNSAVAWSNKSDFACANAFNNSIIPEDTFFPSPESSCDVKLVEKSFETDTNLNFQNLSVIGFRILLLKVAGFNLLMTLRLWS

SEQ ID NO: 354 - protein, 311 aa, Homo sapiens
MSISLLCCAAFPLLWAGPVNAGVTQTPKFRILKIGQSMTLQCTQDMNHNYMYWYRQDPGMGLKLIYYSVGAGITDKGEVPNGYNVSRSTTEDFPLRLELAAPSQTSVYFCASSPGGRAETQYFGPGTRLLVLEDLKNVFPPEVAVFEPSEAEISHTQKATLVCLATGFYPDHVELSWWVNGKEVHSGVSTDPQPLKEQPALNDSRYCLSSRLRVSATFWQNPRNHFRCQVQFYGLSENDEWTQDRAKPVTQIVSAEAWGRADCGFTSESYQQGVLSATILYEILLGKATLYAVLVSALVLMAMVKRKDSRG

SEQ ID NO: 355 - protein, 274 aa, Homo sapiens
MAGIRALFMYLWLQLDWVSRGESVGLHLPTLSVQEGDNSIINCAYSNSASDYFIWYKQESGKGPQFIIDIRSNMDKRQGQRVTVLLNKTVKHLSLQIAATQPGDSAVYFCAERTDSWGKLQFEFGAGTQVVVTPDIQNPDPAVYQLRDSKSSDKSVCLFTDFDSQTNVSQSKDSDVYITDKTVLDMRSMDFKSNSAVAWSNKSDFACANAFNNSIIPEDTFFPSPESSCDVKLVEKSFETDTNLNFQNLSVIGFRILLLKVAGFNLLMTLRLWS

SEQ ID NO: 356 - protein, 312 aa, Homo sapiens
MSIGLLCCVAFSLLWASPVNAGVTQTPKFQVLKTGQSMTLQCAQDMNHNSMYWYRQDPGMGLRLIYYSASEGTTDKGEVPNGYNVSRLNKREFSLRLESAAPSQTSVYFCASSERQGVGTEQFFGPGTRLTVLEDLKNVFPPEVAVFEPSEAEISHTQKATLVCLATGFYPDHVELSWWVNGKEVHSGVSTDPQPLKEQPALNDSRYCLSSRLRVSATFWQNPRNHFRCQVQFYGLSENDEWTQDRAKPVTQIVSAEAWGRADCGFTSESYQQGVLSATILYEILLGKATLYAVLVSALVLMAMVKRKDSRG

SEQ ID NO: 357 - protein, 274 aa, Homo sapiens
MLLLLIPVLGMIFALRDARAQSVSQHNHHVILSEAASLELGCNYSYGGTVNLFWYVQYPGQHLQLLLKYFSGDPLVKGIKGFEAEFIKSKFSFNLRKPSVQWSDTAEYFCAVNEESSGYSTLTFGKGTMLLVSPDIQNPDPAVYQLRDSKSSDKSVCLFTDFDSQTNVSQSKDSDVYITDKTVLDMRSMDFKSNSAVAWSNKSDFACANAFNNSIIPEDTFFPSPESSCDVKLVEKSFETDTNLNFQNLSVIGFRILLLKVAGFNLLMTLRLWS

SEQ ID NO: 358 - protein, 316 aa, Homo sapiens
MGTSLLCWMALCLLGADHADTGVSQNPRHKITKRGQNVTFRCDPISEHNRLYWYRQTLGQGPEFLTYFQNEAQLEKSRLLSDRFSAERPKGSFSTLEIQRTEQGDSAMYLCASSPGSEGGPFYNEQFFGPGTRLTVLEDLKNVFPPEVAVFEPSEAEISHTQKATLVCLATGFYPDHVELSWWVNGKEVHSGVSTDPQPLKEQPALNDSRYCLSSRLRVSATFWQNPRNHFRCQVQFYGLSENDEWTQDRAKPVTQIVSAEAWGRADCGFTSESYQQGVLSATILYEILLGKATLYAVLVSALVLMAMVKRKDSRG

SEQ ID NO: 359 - protein, 275 aa, Homo sapiens
MSLSSLLKVVTASLWLGPGIAQKITQTQPGMFVQEKEAVTLDCTYDTSDPSYGLFWYKQPSSGEMIFLIYQGSYDQQNATEGRYSLNFQKARKSANLVISASQLGDSAMYFCAMRGREGAQKLVFGQGTRLTINPNIQNPDPAVYQLRDSKSSDKSVCLFTDFDSQTNVSQSKDSDVYITDKTVLDMRSMDFKSNSAVAWSNKSDFACANAFNNSIIPEDTFFPSPESSCDVKLVEKSFETDTNLNFQNLSVIGFRILLLKVAGFNLLMTLRLWS

SEQ ID NO: 360 - protein, 315 aa, Homo sapiens
MDTWLVCWAIFSLLKAGLTEPEVTQTPSHQVTQMGQEVILRCVPISNHLYFYWYRQILGQKVEFLVSFYNNEISEKSEIFDDQFSVERPDGSNFTLKIRSTKLEDSAMYFCASSRGLELSGANVLTFGAGSRLTVLEDLKNVFPPEVAVFEPSEAEISHTQKATLVCLATGFYPDHVELSWWVNGKEVHSGVSTDPQPLKEQPALNDSRYCLSSRLRVSATFWQNPRNHFRCQVQFYGLSENDEWTQDRAKPVTQIVSAEAWGRADCGFTSESYQQGVLSATILYEILLGKATLYAVLVSALVLMAMVKRKDSRG

SEQ ID NO: 361 - protein, 283 aa, Homo sapiens
MAMLLGASVLILWLQPDWVNSQQKNDDQQVKQNSPSLSVQEGRISILNCDYTNSMFDYFLWYKKYPAEGPTFLISISSIKDKNEDGRFTVFLNKSAKHLSLHIVPSQPGDSAVYFCAASEGSGGGTSYGKLTFGQGTILTVHPNIQNPDPAVYQLRDSKSSDKSVCLFTDFDSQTNVSQSKDSDVYITDKTVLDMRSMDFKSNSAVAWSNKSDFACANAFNNSIIPEDTFFPSPESSCDVKLVEKSFETDTNLNFQNLSVIGFRILLLKVAGFNLLMTLRLWS

SEQ ID NO: 362 - protein, 313 aa, Homo sapiens
MGCRLLCCAVLCLLGAVPIDTEVTQTPKHLVMGMTNKKSLKCEQHMGHRAMYWYKQKAKKPPELMFVYSYEKLSINESVPSRFSPECPNSSLLNLHLHALQPEDSALYLCASSQDQHSSYNEQFFGPGTRLTVLEDLKNVFPPEVAVFEPSEAEISHTQKATLVCLATGFYPDHVELSWWVNGKEVHSGVSTDPQPLKEQPALNDSRYCLSSRLRVSATFWQNPRNHFRCQVQFYGLSENDEWTQDRAKPVTQIVSAEAWGRADCGFTSESYQQGVLSATILYEILLGKATLYAVLVSALVLMAMVKRKDSRG

SEQ ID NO: 363 - protein, 270 aa, Homo sapiens
METLLGLLILWLQLQWVSSKQEVTQIPAALSVPEGENLVLNCSFTDSAIYNLQWFRQDPGKGLTSLLLIQSSQREQTSGRLNASLDKSSGRSTLYIAASQPGDSATYLCAVSGTYKYIFGTGTRLKVLANIIQNPDPAVYQLRDSKSSDKSVCLFTDFDSQTNVSQSKDSDVYITDKTVLDMRSMDFKSNSAVAWSNKSDFACANAFNNSIIPEDTFFPSPESSCDVKLVEKSFETDTNLNFQNLSVIGFRILLLKVAGFNLLMTLRLWS

SEQ ID NO: 364 - protein, 309 aa, Homo sapiens
MSNQVLCCVVLCFLGANTVDGGITQSPKYLFRKEGQNVTLSCEQNLNHDAMYWYRQDPGQGLRLIYYSQIVNDFQKGDIAEGYSVSREKKESFPLTVTSAQKNPTAFYLCATKKDSYEQYFGPGTRLTVTEDLKNVFPPEVAVFEPSEAEISHTQKATLVCLATGFYPDHVELSWWVNGKEVHSGVSTDPQPLKEQPALNDSRYCLSSRLRVSATFWQNPRNHFRCQVQFYGLSENDEWTQDRAKPVTQIVSAEAWGRADCGFTSESYQQGVLSATILYEILLGKATLYAVLVSALVLMAMVKRKDSRG

SEQ ID NO: 365 - protein, 268 aa, Homo sapiens
MRLVARVTVFLTFGTIIDAKTTQPPSMDCAEGRAANLPCNHSTISGNEYVYWYRQIHSQGPQYIIHGLKNNETNEMASLIITEDRKSSTLILPHATLRDTAVYYCIVRSTGTASKLTFGTGTRLQVTLDIQNPDPAVYQLRDSKSSDKSVCLFTDFDSQTNVSQSKDSDVYITDKTVLDMRSMDFKSNSAVAWSNKSDFACANAFNNSIIPEDTFFPSPESSCDVKLVEKSFETDTNLNFQNLSVIGFRILLLKVAGFNLLMTLRLWS

SEQ ID NO: 366 - protein, 314 aa, Homo sapiens
MGFRLLCCVAFCLLGAGPVDSGVTQTPKHLITATGQRVTLRCSPRSGDLSVYWYQQSLDQGLQFLIQYYNGEERAKGNILERFSAQQFPDLHSELNLSSLELGDSALYFCASSVEGSGGFTDTQYFGPGTRLTVLEDLKNVFPPEVAVFEPSEAEISHTQKATLVCLATGFYPDHVELSWWVNGKEVHSGVSTDPQPLKEQPALNDSRYCLSSRLRVSATFWQNPRNHFRCQVQFYGLSENDEWTQDRAKPVTQIVSAEAWGRADCGFTSESYQQGVLSATILYEILLGKATLYAVLVSALVLMAMVKRKDSRG

SEQ ID NO: 367 - protein, 273 aa, Homo sapiens
METLLGVSLVILWLQLARVNSQQGEEDPQALSIQEGENATMNCSYKTSINNLQWYRQNSGRGLVHLILIRSNEREKHSGRLRVTLDTSKKSSSLLITASRAADTASYFCATDGGGTAGNKLTFGGGTRVLVKPNIQNPDPAVYQLRDSKSSDKSVCLFTDFDSQTNVSQSKDSDVYITDKTVLDMRSMDFKSNSAVAWSNKSDFACANAFNNSIIPEDTFFPSPESSCDVKLVEKSFETDTNLNFQNLSVIGFRILLLKVAGFNLLMTLRLWS

SEQ ID NO: 368 - protein, 318 aa, Homo sapiens
MGPQLLGYVVLCLLGAGPLEAQVTQNPRYLITVTGKKLTVTCSQNMNHEYMSWYRQDPGLGLRQIYYSMNVEVTDKGDVPEGYKVSRKEKRNFPLILESPSPNQTSLYFCASSSLSRTSGGLLSYNEQFFGPGTRLTVLEDLKNVFPPEVAVFEPSEAEISHTQKATLVCLATGFYPDHVELSWWVNGKEVHSGVSTDPQPLKEQPALNDSRYCLSSRLRVSATFWQNPRNHFRCQVQFYGLSENDEWTQDRAKPVTQIVSAEAWGRADCGFTSESYQQGVLSATILYEILLGKATLYAVLVSALVLMAMVKRKDSRG

SEQ ID NO: 369 - protein, 273 aa, Homo sapiens
MMKSLRVLLVILWLQLSWVWSQQKEVEQDPGPLSVPEGAIVSLNCTYSNSAFQYFMWYRQYSRKGPELLMYTYSSGNKEDGRFTAQVDKSSKYISLFIRDSQPSDSATYLCASQGDSNYQLIWGAGTKLIIKPDIQNPDPAVYQLRDSKSSDKSVCLFTDFDSQTNVSQSKDSDVYITDKTVLDMRSMDFKSNSAVAWSNKSDFACANAFNNSIIPEDTFFPSPESSCDVKLVEKSFETDTNLNFQNLSVIGFRILLLKVAGFNLLMTLRLWS

SEQ ID NO: 370 - protein, 311 aa, Homo sapiens
MGFRLLCCVAFCLLGAGPVDSGVTQTPKHLITATGQRVTLRCSPRSGDLSVYWYQQSLDQGLQFLIQYYNGEERAKGNILERFSAQQFPDLHSELNLSSLELGDSALYFCASSTGQIATNEKLFFGSGTQLSVLEDLNKVFPPEVAVFEPSEAEISHTQKATLVCLATGFFPDHVELSWWVNGKEVHSGVSTDPQPLKEQPALNDSRYCLSSRLRVSATFWQNPRNHFRCQVQFYGLSENDEWTQDRAKPVTQIVSAEAWGRADCGFTSVSYQQGVLSATILYEILLGKATLYAVLVSALVLMAMVKRKDF

SEQ ID NO: 371 - protein, 273 aa, Homo sapiens
MACPGFLWALVISTCLEFSMAQTVTQSQPEMSVQEAETVTLSCTYDTSESDYYLFWYKQPPSRQMILVIRQEAYKQQNATENRFSVNFQKAAKSFSLKISDSQLGDAAMYFCATGGGAQKLVFGQGTRLTINPNIQNPDPAVYQLRDSKSSDKSVCLFTDFDSQTNVSQSKDSDVYITDKTVLDMRSMDFKSNSAVAWSNKSDFACANAFNNSIIPEDTFFPSPESSCDVKLVEKSFETDTNLNFQNLSVIGFRILLLKVAGFNLLMTLRLWS

SEQ ID NO: 372 - protein, 312 aa, Homo sapiens
MSNQVLCCVVLCFLGANTVDGGITQSPKYLFRKEGQNVTLSCEQNLNHDAMYWYRQDPGQGLRLIYYSQIVNDFQKGDIAEGYSVSREKKESFPLTVTSAQKNPTAFYLCASSILVPGANVLTFGAGSRLTVLEDLKNVFPPEVAVFEPSEAEISHTQKATLVCLATGFYPDHVELSWWVNGKEVHSGVSTDPQPLKEQPALNDSRYCLSSRLRVSATFWQNPRNHFRCQVQFYGLSENDEWTQDRAKPVTQIVSAEAWGRADCGFTSESYQQGVLSATILYEILLGKATLYAVLVSALVLMAMVKRKDSRG

SEQ ID NO: 373 - protein, 273 aa, Homo sapiens
MLLLLIPVLGMIFALRDARAQSVSQHNHHVILSEAASLELGCNYSYGGTVNLFWYVQYPGQHLQLLLKYFSGDPLVKGIKGFEAEFIKSKFSFNLRKPSVQWSDTAEYFCAVNAQGLNARLMFGDGTQLVVKPNIQNPDPAVYQLRDSKSSDKSVCLFTDFDSQTNVSQSKDSDVYITDKTVLDMRSMDFKSNSAVAWSNKSDFACANAFNNSIIPEDTFFPSPESSCDVKLVEKSFETDTNLNFQNLSVIGFRILLLKVAGFNLLMTLRLWS

SEQ ID NO: 374 - protein, 310 aa, Homo sapiens
MSIGLLCCAALSLLWAGPVNAGVTQTPKFQVLKTGQSMTLQCAQDMNHEYMSWYRQDPGMGLRLIHYSVGAGITDQGEVPNGYNVSRSTTEDFPLRLLSAAPSQTSVYFCASRFPWGGDTEAFFGQGTRLTVVEDLNKVFPPEVAVFEPSEAEISHTQKATLVCLATGFFPDHVELSWWVNGKEVHSGVSTDPQPLKEQPALNDSRYCLSSRLRVSATFWQNPRNHFRCQVQFYGLSENDEWTQDRAKPVTQIVSAEAWGRADCGFTSVSYQQGVLSATILYEILLGKATLYAVLVSALVLMAMVKRKDF

SEQ ID NO: 375 - protein, 273 aa, Homo sapiens
MLLLLVPVLEVIFTLGGTRAQSVTQLGSHVSVSEGALVLLRCNYSSSVPPYLFWYVQYPNQGLQLLLKYTSAATLVKGINGFEAEFKKSETSFHLTKPSAHMSDAAEYFCAVKVEGGSEKLVFGKGTKLTVNPYIQNPDPAVYQLRDSKSSDKSVCLFTDFDSQTNVSQSKDSDVYITDKTVLDMRSMDFKSNSAVAWSNKSDFACANAFNNSIIPEDTFFPSPESSCDVKLVEKSFETDTNLNFQNLSVIGFRILLLKVAGFNLLMTLRLWS

SEQ ID NO: 376 - protein, 314 aa, Homo sapiens
MGPGLLCWVLLCLLGAGSVETGVTQSPTHLIKTRGQQVTLRCSSQSGHNTVSWYQQALGQGPQFIFQYYREEENGRGNFPPRFSGLQFPNYSSELNVNALELDDSALYLCASSLGTRRGAYNEQFFGPGTRLTVLEDLKNVFPPEVAVFEPSEAEISHTQKATLVCLATGFYPDHVELSWWVNGKEVHSGVSTDPQPLKEQPALNDSRYCLSSRLRVSATFWQNPRNHFRCQVQFYGLSENDEWTQDRAKPVTQIVSAEAWGRADCGFTSESYQQGVLSATILYEILLGKATLYAVLVSALVLMAMVKRKDSRG

SEQ ID NO: 377 - protein, 274 aa, Homo sapiens
MAGIRALFMYLWLQLDWVSRGESVGLHLPTLSVQEGDNSIINCAYSNSASDYFIWYKQESGKGPQFIIDIRSNMDKRQGQRVTVLLNKTVKHLSLQIAATQPGDSAVYFCAEDAGGTSYGKLTFGQGTILTVHPNIQNPDPAVYQLRDSKSSDKSVCLFTDFDSQTNVSQSKDSDVYITDKTVLDMRSMDFKSNSAVAWSNKSDFACANAFNNSIIPEDTFFPSPESSCDVKLVEKSFETDTNLNFQNLSVIGFRILLLKVAGFNLLMTLRLWS

SEQ ID NO: 378 - protein, 311 aa, Homo sapiens
MGTSLLCWVVLGFLGTDHTGAGVSQSPRYKVTKRGQDVALRCDPISGHVSLYWYRQALGQGPEFLTYFNYEAQQDKSGLPNDRFSAERPEGSISTLTIQRTEQRDSAMYRCASGVSSYNEQFFGPGTRLTVLEDLKNVFPPEVAVFEPSEAEISHTQKATLVCLATGFYPDHVELSWWVNGKEVHSGVSTDPQPLKEQPALNDSRYCLSSRLRVSATFWQNPRNHFRCQVQFYGLSENDEWTQDRAKPVTQIVSAEAWGRADCGFTSESYQQGVLSATILYEILLGKATLYAVLVSALVLMAMVKRKDSRG

SEQ ID NO: 379 - protein, 274 aa, Homo sapiens
MLTASLLRAVIASICVVSSMAQKVTQAQTEISVVEKEDVTLDCVYETRDTTYYLFWYKQPPSGELVFLIRRNSFDEQNEISGRYSWNFQKSTSSFNFTITASQVVDSAVYFCALSDNSGYALNFGKGTSLLVTPHIQNPDPAVYQLRDSKSSDKSVCLFTDFDSQTNVSQSKDSDVYITDKTVLDMRSMDFKSNSAVAWSNKSDFACANAFNNSIIPEDTFFPSPESSCDVKLVEKSFETDTNLNFQNLSVIGFRILLLKVAGFNLLMTLRLWS

SEQ ID NO: 380 - protein, 314 aa, Homo sapiens
MGTSLLCWMALCLLGADHADTGVSQNPRHKITKRGQNVTFRCDPISEHNRLYWYRQTLGQGPEFLTYFQNEAQLEKSRLLSDRFSAERPKGSFSTLEIQRTEQGDSAMYLCASSPKDSQRNNEQFFGPGTRLTVLEDLKNVFPPEVAVFEPSEAEISHTQKATLVCLATGFYPDHVELSWWVNGKEVHSGVSTDPQPLKEQPALNDSRYCLSSRLRVSATFWQNPRNHFRCQVQFYGLSENDEWTQDRAKPVTQIVSAEAWGRADCGFTSESYQQGVLSATILYEILLGKATLYAVLVSALVLMAMVKRKDSRG

SEQ ID NO: 381 - protein, 272 aa, Homo sapiens
MKSLRVLLVILWLQLSWVWSQQKEVEQNSGPLSVPEGAIASLNCTYSDRGSQSFFWYRQYSGKSPELIMFIYSNGDKEDGRFTAQLNKASQYVSLLIRDSQPSDSATYLCAVNGAAGNKLTFGGGTRVLVKPNIQNPDPAVYQLRDSKSSDKSVCLFTDFDSQTNVSQSKDSDVYITDKTVLDMRSMDFKSNSAVAWSNKSDFACANAFNNSIIPEDTFFPSPESSCDVKLVEKSFETDTNLNFQNLSVIGFRILLLKVAGFNLLMTLRLWS

SEQ ID NO: 382 - protein, 309 aa, Homo sapiens
MSIGLLCCVAFSLLWASPVNAGVTQTPKFQVLKTGQSMTLQCAQDMNHNSMYWYRQDPGMGLRLIYYSASEGTTDKGEVPNGYNVSRLNKREFSLRLESAAPSQTSVYFCASSETRETQYFGPGTRLLVLEDLKNVFPPEVAVFEPSEAEISHTQKATLVCLATGFYPDHVELSWWVNGKEVHSGVSTDPQPLKEQPALNDSRYCLSSRLRVSATFWQNPRNHFRCQVQFYGLSENDEWTQDRAKPVTQIVSAEAWGRADCGFTSESYQQGVLSATILYEILLGKATLYAVLVSALVLMAMVKRKDSRG

SEQ ID NO: 383 - protein, 278 aa, Homo sapiens
MAMLLGASVLILWLQPDWVNSQQKNDDQQVKQNSPSLSVQEGRISILNCDYTNSMFDYFLWYKKYPAEGPTFLISISSIKDKNEDGRFTVFLNKSAKHLSLHIVPSQPGDSAVYFCAASYSGNTPLVFGKGTRLSVIANIQNPDPAVYQLRDSKSSDKSVCLFTDFDSQTNVSQSKDSDVYITDKTVLDMRSMDFKSNSAVAWSNKSDFACANAFNNSIIPEDTFFPSPESSCDVKLVEKSFETDTNLNFQNLSVIGFRILLLKVAGFNLLMTLRLWS

SEQ ID NO: 384 - protein, 314 aa, Homo sapiens
MGSWTLCCVSLCILVAKHTDAGVIQSPRHEVTEMGQEVTLRCKPISGHDYLFWYRQTMMRGLELLIYFNNNVPIDDSGMPEDRFSAKMPNASFSTLKIQPSEPRDSAVYFCASSLMVGDRTLRNTIYFGEGSWLTVVEDLNKVFPPEVAVFEPSEAEISHTQKATLVCLATGFFPDHVELSWWVNGKEVHSGVSTDPQPLKEQPALNDSRYCLSSRLRVSATFWQNPRNHFRCQVQFYGLSENDEWTQDRAKPVTQIVSAEAWGRADCGFTSVSYQQGVLSATILYEILLGKATLYAVLVSALVLMAMVKRKDF

SEQ ID NO: 385 - protein, 269 aa, Homo sapiens
MTSIRAVFIFLWLQLDLVNGENVEQHPSTLSVQEGDSAVIKCTYSDSASNYFPWYKQELGKGPQLIIDIRSNVGEKKDQRIAVTLNKTAKHFSLHITETQPEDSAVYFCAATSYDKVIFGPGTSLSVIPNIQNPDPAVYQLRDSKSSDKSVCLFTDFDSQTNVSQSKDSDVYITDKTVLDMRSMDFKSNSAVAWSNKSDFACANAFNNSIIPEDTFFPSPESSCDVKLVEKSFETDTNLNFQNLSVIGFRILLLKVAGFNLLMTLRLWS

SEQ ID NO: 386 - protein, 305 aa, Homo sapiens
MLSLLLLLLGLGSVFSAVISQKPSRDICQRGTSLTIQCQVDSQVTMMFWYRQQPGQSLTLIATANQGSEATYESGFVIDKFPISRPNLTFSTLTVSNMSPEDSSIYLCSVFSGATEAFFGQGTRLTVVEDLNKVFPPEVAVFEPSEAEISHTQKATLVCLATGFFPDHVELSWWVNGKEVHSGVSTDPQPLKEQPALNDSRYCLSSRLRVSATFWQNPRNHFRCQVQFYGLSENDEWTQDRAKPVTQIVSAEAWGRADCGFTSVSYQQGVLSATILYEILLGKATLYAVLVSALVLMAMVKRKDF

SEQ ID NO: 387 - protein, 270 aa, Homo sapiens
MMKCPQALLAIFWLLLSWVSSEDKVVQSPLSLVVHEGDTVTLNCSYEVTNFRSLLWYKQEKKAPTFLFMLTSSGIEKKSGRLSSILDKKELSSILNITATQTGDSAIYLCAVLDAGKSTFGDGTTLTVKPNIQNPDPAVYQLRDSKSSDKSVCLFTDFDSQTNVSQSKDSDVYITDKTVLDMRSMDFKSNSAVAWSNKSDFACANAFNNSIIPEDTFFPSPESSCDVKLVEKSFETDTNLNFQNLSVIGFRILLLKVAGFNLLMTLRLWS

SEQ ID NO: 388 - protein, 315 aa, Homo sapiens
MGPQLLGYVVLCLLGAGPLEAQVTQNPRYLITVTGKKLTVTCSQNMNHEYMSWYRQDPGLGLRQIYYSMNVEVTDKGDVPEGYKVSRKEKRNFPLILESPSPNQTSLYFCASSALTGNLLAKNIQYFGAGTRLSVLEDLKNVFPPEVAVFEPSEAEISHTQKATLVCLATGFYPDHVELSWWVNGKEVHSGVSTDPQPLKEQPALNDSRYCLSSRLRVSATFWQNPRNHFRCQVQFYGLSENDEWTQDRAKPVTQIVSAEAWGRADCGFTSESYQQGVLSATILYEILLGKATLYAVLVSALVLMAMVKRKDSRG

SEQ ID NO: 389 - protein, 273 aa, Homo sapiens
MTRVSLLWAVVVSTCLESGMAQTVTQSQPEMSVQEAETVTLSCTYDTSENNYYLFWYKQPPSRQMILVIRQEAYKQQNATENRFSVNFQKAAKSFSLKISDSQLGDTAMYFCAFMTYNARLMFGDGTQLVVKPNIQNPDPAVYQLRDSKSSDKSVCLFTDFDSQTNVSQSKDSDVYITDKTVLDMRSMDFKSNSAVAWSNKSDFACANAFNNSIIPEDTFFPSPESSCDVKLVEKSFETDTNLNFQNLSVIGFRILLLKVAGFNLLMTLRLWS

SEQ ID NO: 390 - protein, 312 aa, Homo sapiens
MGIRLLCRVAFCFLAVGLVDVKVTQSSRYLVKRTGEKVFLECVQDMDHENMFWYRQDPGLGLRLIYFSYDVKMKEKGDIPEGYSVSREKKERFSLILESASTNQTSMYLCASSAPGREDSNQPQHFGDGTRLSILEDLNKVFPPEVAVFEPSEAEISHTQKATLVCLATGFFPDHVELSWWVNGKEVHSGVSTDPQPLKEQPALNDSRYCLSSRLRVSATFWQNPRNHFRCQVQFYGLSENDEWTQDRAKPVTQIVSAEAWGRADCGFTSVSYQQGVLSATILYEILLGKATLYAVLVSALVLMAMVKRKDF

SEQ ID NO: 391 - protein, 267 aa, Homo sapiens
MRQVARVIVFLTLSTLSLAKTTQPISMDSYEGQEVNITCSHNNIATNDYITWYQQFPSQGPRFIIQGYKTKVTNEVASLFIPADRKSSTLSLPRVSLSDTAVYYCLVEESSASKIIFGSGTRLSIRPNIQNPDPAVYQLRDSKSSDKSVCLFTDFDSQTNVSQSKDSDVYITDKTVLDMRSMDFKSNSAVAWSNKSDFACANAFNNSIIPEDTFFPSPESSCDVKLVEKSFETDTNLNFQNLSVIGFRILLLKVAGFNLLMTLRLWS

SEQ ID NO: 392 - protein, 311 aa, Homo sapiens
MGPRLLFWALLCLLGTGPVEAGVTQSPTHLIKTRGQQATLRCSPISGHTSVYWYQQALGLGLQFLLWYDEGEERNRGNFPPRFSGRQFPNYSSELNVNALELEDSALYLCASSLVAGRYEQYFGPGTRLTVTEDLKNVFPPEVAVFEPSEAEISHTQKATLVCLATGFYPDHVELSWWVNGKEVHSGVSTDPQPLKEQPALNDSRYCLSSRLRVSATFWQNPRNHFRCQVQFYGLSENDEWTQDRAKPVTQIVSAEAWGRADCGFTSESYQQGVLSATILYEILLGKATLYAVLVSALVLMAMVKRKDSRG

SEQ ID NO: 393 - protein, 273 aa, Homo sapiens
MKLVTSITVLLSLGIMGDAKTTQPNSMESNEEEPVHLPCNHSTISGTDYIHWYRQLPSQGPEYVIHGLTSNVNNRMASLAIAEDRKSSTLILHRATLRDAAVYYCILSAGWGAGGTSYGKLTFGQGTILTVHPNIQNPDPAVYQLRDSKSSDKSVCLFTDFDSQTNVSQSKDSDVYITDKTVLDMRSMDFKSNSAVAWSNKSDFACANAFNNSIIPEDTFFPSPESSCDVKLVEKSFETDTNLNFQNLSVIGFRILLLKVAGFNLLMTLRLWS

SEQ ID NO: 394 - protein, 312 aa, Homo sapiens
MGTSLLCWVVLGFLGTDHTGAGVSQSPRYKVTKRGQDVTLRCDPISSHATLYWYQQALGQGPEFLTYFNYEAQPDKSGLPSDRFSAERPEGSISTLTIQRTEQRDSAMYRCASSVGTSPDEQYFGPGTRLTVTEDLKNVFPPEVAVFEPSEAEISHTQKATLVCLATGFYPDHVELSWWVNGKEVHSGVSTDPQPLKEQPALNDSRYCLSSRLRVSATFWQNPRNHFRCQVQFYGLSENDEWTQDRAKPVTQIVSAEAWGRADCGFTSESYQQGVLSATILYEILLGKATLYAVLVSALVLMAMVKRKDSRG

SEQ ID NO: 395 - protein, 274 aa, Homo sapiens
MTSIRAVFIFLWLQLDLVNGENVEQHPSTLSVQEGDSAVIKCTYSDSASNYFPWYKQELGKGPQLIIDIRSNVGEKKDQRIAVTLNKTAKHFSLHITETQPEDSAVYFCAAEHGGGTSYGKLTFGQGTILTVHPNIQNPDPAVYQLRDSKSSDKSVCLFTDFDSQTNVSQSKDSDVYITDKTVLDMRSMDFKSNSAVAWSNKSDFACANAFNNSIIPEDTFFPSPESSCDVKLVEKSFETDTNLNFQNLSVIGFRILLLKVAGFNLLMTLRLWS

SEQ ID NO: 396 - protein, 311 aa, Homo sapiens
MGTSLLCWVVLGFLGTDHTGAGVSQSPRYKVTKRGQDVALRCDPISGHVSLYWYRQALGQGPEFLTYFNYEAQQDKSGLPNDRFSAERPEGSISTLTIQRTEQRDSAMYRCASSVSSYNEQFFGPGTRLTVLEDLKNVFPPEVAVFEPSEAEISHTQKATLVCLATGFYPDHVELSWWVNGKEVHSGVSTDPQPLKEQPALNDSRYCLSSRLRVSATFWQNPRNHFRCQVQFYGLSENDEWTQDRAKPVTQIVSAEAWGRADCGFTSESYQQGVLSATILYEILLGKATLYAVLVSALVLMAMVKRKDSRG

SEQ ID NO: 397 - protein, 273 aa, Homo sapiens
MNYSPGLVSLILLLLGRTRGNSVTQMEGPVTLSEEAFLTINCTYTATGYPSLFWYVQYPGEGLQLLLKATKADDKGSNKGFEATYRKETTSFHLEKGSVQVSDSAVYFCALSDPEGGSEKLVFGKGTKLTVNPYIQNPDPAVYQLRDSKSSDKSVCLFTDFDSQTNVSQSKDSDVYITDKTVLDMRSMDFKSNSAVAWSNKSDFACANAFNNSIIPEDTFFPSPESSCDVKLVEKSFETDTNLNFQNLSVIGFRILLLKVAGFNLLMTLRLWS

SEQ ID NO: 398 - protein, 312 aa, Homo sapiens
MDTRVLCCAVICLLGAGLSNAGVMQNPRHLVRRRGQEARLRCSPMKGHSHVYWYRQLPEEGLKFMVYLQKENIIDESGMPKERFSAEFPKEGPSILRIQQVVRGDSAAYFCASSSTGDRYEQYFGPGTRLTVTEDLKNVFPPEVAVFEPSEAEISHTQKATLVCLATGFYPDHVELSWWVNGKEVHSGVSTDPQPLKEQPALNDSRYCLSSRLRVSATFWQNPRNHFRCQVQFYGLSENDEWTQDRAKPVTQIVSAEAWGRADCGFTSESYQQGVLSATILYEILLGKATLYAVLVSALVLMAMVKRKDSRG

SEQ ID NO: 399 - protein, 275 aa, Homo sapiens
MLLELIPLLGIHFVLRTARAQSVTQPDIHITVSEGASLELRCNYSYGATPYLFWYVQSPGQGLQLLLKYFSGDTLVQGIKGFEAEFKRSQSSFNLRKPSVHWSDAAEYFCAVGALSGGSNYKLTFGKGTLLTVNPNIQNPDPAVYQLRDSKSSDKSVCLFTDFDSQTNVSQSKDSDVYITDKTVLDMRSMDFKSNSAVAWSNKSDFACANAFNNSIIPEDTFFPSPESSCDVKLVEKSFETDTNLNFQNLSVIGFRILLLKVAGFNLLMTLRLWS

SEQ ID NO: 400 - protein, 310 aa, Homo sapiens
MGTRLFFYVALCLLWAGHRDAGITQSPRYKITETGRQVTLMCHQTWSHSYMFWYRQDLGHGLRLIYYSAAADITDKGEVPDGYVVSRSKTENFPLTLESATRSQTSVYFCASSELSTVNYGYTFGSGTRLTVVEDLNKVFPPEVAVFEPSEAEISHTQKATLVCLATGFFPDHVELSWWVNGKEVHSGVSTDPQPLKEQPALNDSRYCLSSRLRVSATFWQNPRNHFRCQVQFYGLSENDEWTQDRAKPVTQIVSAEAWGRADCGFTSVSYQQGVLSATILYEILLGKATLYAVLVSALVLMAMVKRKDF

SEQ ID NO: 401 - protein, 272 aa, Homo sapiens
METLLGLLILWLQLQWVSSKQEVTQIPAALSVPEGENLVLNCSFTDSAIYNLQWFRQDPGKGLTSLLLIQSSQREQTSGRLNASLDKSSGRSTLYIAASQPGDSATYLCAVRLSTSYDKVIFGPGTSLSVIPNIQNPDPAVYQLRDSKSSDKSVCLFTDFDSQTNVSQSKDSDVYITDKTVLDMRSMDFKSNSAVAWSNKSDFACANAFNNSIIPEDTFFPSPESSCDVKLVEKSFETDTNLNFQNLSVIGFRILLLKVAGFNLLMTLRLWS

SEQ ID NO: 402 - protein, 312 aa, Homo sapiens
MGCRLLCCAVLCLLGAVPIDTEVTQTPKHLVMGMTNKKSLKCEQHMGHRAMYWYKQKAKKPPELMFVYSYEKLSINESVPSRFSPECPNSSLLNLHLHALQPEDSALYLCASQTLLAPNNEQFFGPGTRLTVLEDLKNVFPPEVAVFEPSEAEISHTQKATLVCLATGFYPDHVELSWWVNGKEVHSGVSTDPQPLKEQPALNDSRYCLSSRLRVSATFWQNPRNHFRCQVQFYGLSENDEWTQDRAKPVTQIVSAEAWGRADCGFTSESYQQGVLSATILYEILLGKATLYAVLVSALVLMAMVKRKDSRG

SEQ ID NO: 403 - protein, 276 aa, Homo sapiens
MEKNPLAAPLLILWFHLDCVSSILNVEQSPQSLHVQEGDSTNFTCSFPSSNFYALHWYRWETAKSPEALFVMTLNGDEKKKGRISATLNTKEGYSYLYIKGSQPEDSATYLCASATPYFGNEKLTFGTGTRLTIIPNIQNPDPAVYQLRDSKSSDKSVCLFTDFDSQTNVSQSKDSDVYITDKTVLDMRSMDFKSNSAVAWSNKSDFACANAFNNSIIPEDTFFPSPESSCDVKLVEKSFETDTNLNFQNLSVIGFRILLLKVAGFNLLMTLRLWS

SEQ ID NO: 404 - protein, 315 aa, Homo sapiens
MGTRLLFWVAFCLLGADHTGAGVSQSPSNKVTEKGKDVELRCDPISGHTALYWYRQSLGQGLEFLIYFQGNSAPDKSGLPSDRFSAERTGGSVSTLTIQRTQQEDSAVYLCASSLGTRRGIYNEQFFGPGTRLTVLEDLKNVFPPEVAVFEPSEAEISHTQKATLVCLATGFYPDHVELSWWVNGKEVHSGVSTDPQPLKEQPALNDSRYCLSSRLRVSATFWQNPRNHFRCQVQFYGLSENDEWTQDRAKPVTQIVSAEAWGRADCGFTSESYQQGVLSATILYEILLGKATLYAVLVSALVLMAMVKRKDSRG

SEQ ID NO: 405 - protein, 270 aa, Homo sapiens
METLLGVSLVILWLQLARVNSQQGEEDPQALSIQEGENATMNCSYKTSINNLQWYRQNSGRGLVHLILIRSNEREKHSGRLRVTLDTSKKSSSLLITASRAADTASYFCATEAAGTALIFGKGTTLSVSSNIQNPDPAVYQLRDSKSSDKSVCLFTDFDSQTNVSQSKDSDVYITDKTVLDMRSMDFKSNSAVAWSNKSDFACANAFNNSIIPEDTFFPSPESSCDVKLVEKSFETDTNLNFQNLSVIGFRILLLKVAGFNLLMTLRLWS

SEQ ID NO: 406 - protein, 306 aa, Homo sapiens
MLSLLLLLLGLGSVFSAVISQKPSRDICQRGTSLTIQCQVDSQVTMMFWYRQQPGQSLTLIATANQGSEATYESGFVIDKFPISRPNLTFSTLTVSNMSPEDSSIYLCSVVSYNEQFFGPGTRLTVLEDLKNVFPPEVAVFEPSEAEISHTQKATLVCLATGFYPDHVELSWWVNGKEVHSGVSTDPQPLKEQPALNDSRYCLSSRLRVSATFWQNPRNHFRCQVQFYGLSENDEWTQDRAKPVTQIVSAEAWGRADCGFTSESYQQGVLSATILYEILLGKATLYAVLVSALVLMAMVKRKDSRG

SEQ ID NO: 407 - protein, 274 aa, Homo sapiens
MAGIRALFMYLWLQLDWVSRGESVGLHLPTLSVQEGDNSIINCAYSNSASDYFIWYKQESGKGPQFIIDIRSNMDKRQGQRVTVLLNKTVKHLSLQIAATQPGDSAVYFCAENPRMDSSYKLIFGSGTRLLVRPDIQNPDPAVYQLRDSKSSDKSVCLFTDFDSQTNVSQSKDSDVYITDKTVLDMRSMDFKSNSAVAWSNKSDFACANAFNNSIIPEDTFFPSPESSCDVKLVEKSFETDTNLNFQNLSVIGFRILLLKVAGFNLLMTLRLWS

SEQ ID NO: 408 - protein, 313 aa, Homo sapiens
MGTSLLCWMALCLLGADHADTGVSQNPRHKITKRGQNVTFRCDPISEHNRLYWYRQTLGQGPEFLTYFQNEAQLEKSRLLSDRFSAERPKGSFSTLEIQRTEQGDSAMYLCASSLLGQGTDEQFFGPGTRLTVLEDLKNVFPPEVAVFEPSEAEISHTQKATLVCLATGFYPDHVELSWWVNGKEVHSGVSTDPQPLKEQPALNDSRYCLSSRLRVSATFWQNPRNHFRCQVQFYGLSENDEWTQDRAKPVTQIVSAEAWGRADCGFTSESYQQGVLSATILYEILLGKATLYAVLVSALVLMAMVKRKDSRG

SEQ ID NO: 409 - protein, 273 aa, Homo sapiens
MTSIRAVFIFLWLQLDLVNGENVEQHPSTLSVQEGDSAVIKCTYSDSASNYFPWYKQELGKGPQLIIDIRSNVGEKKDQRIAVTLNKTAKHFSLHITETQPEDSAVYFCAAYSPRFGNEKLTFGTGTRLTIIPNIQNPDPAVYQLRDSKSSDKSVCLFTDFDSQTNVSQSKDSDVYITDKTVLDMRSMDFKSNSAVAWSNKSDFACANAFNNSIIPEDTFFPSPESSCDVKLVEKSFETDTNLNFQNLSVIGFRILLLKVAGFNLLMTLRLWS

SEQ ID NO: 410 - protein, 310 aa, Homo sapiens
MGSRLLCWVLLCLLGAGPVKAGVTQTPRYLIKTRGQQVTLSCSPISGHRSVSWYQQTPGQGLQFLFEYFSETQRNKGNFPGRFSGRQFSNSRSEMNVSTLELGDSALYLCASSDGGAYEQYFGPGTRLTVTEDLKNVFPPEVAVFEPSEAEISHTQKATLVCLATGFYPDHVELSWWVNGKEVHSGVSTDPQPLKEQPALNDSRYCLSSRLRVSATFWQNPRNHFRCQVQFYGLSENDEWTQDRAKPVTQIVSAEAWGRADCGFTSESYQQGVLSATILYEILLGKATLYAVLVSALVLMAMVKRKDSRG

SEQ ID NO: 411 - protein, 274 aa, Homo sapiens
METLLKVLSGTLLWQLTWVRSQQPVQSPQAVILREGEDAVINCSSSKALYSVHWYRQKHGEAPVFLMILLKGGEQKGHEKISASFNEKKQQSSLYLTASQLSYSGTYFCGTEELDKAAGNKLTFGGGTRVLVKPNIQNPDPAVYQLRDSKSSDKSVCLFTDFDSQTNVSQSKDSDVYITDKTVLDMRSMDFKSNSAVAWSNKSDFACANAFNNSIIPEDTFFPSPESSCDVKLVEKSFETDTNLNFQNLSVIGFRILLLKVAGFNLLMTLRLWS

SEQ ID NO: 412 - protein, 317 aa, Homo sapiens
MGSWTLCCVSLCILVAKHTDAGVIQSPRHEVTEMGQEVTLRCKPISGHDYLFWYRQTMMRGLELLIYFNNNVPIDDSGMPEDRFSAKMPNASFSTLKIQPSEPRDSAVYFCASSPPGLATLYSSETQYFGPGTRLLVLEDLKNVFPPEVAVFEPSEAEISHTQKATLVCLATGFYPDHVELSWWVNGKEVHSGVSTDPQPLKEQPALNDSRYCLSSRLRVSATFWQNPRNHFRCQVQFYGLSENDEWTQDRAKPVTQIVSAEAWGRADCGFTSESYQQGVLSATILYEILLGKATLYAVLVSALVLMAMVKRKDSRG

SEQ ID NO: 413 - protein, 266 aa, Homo sapiens
MVLKFSVSILWIQLAWVSTQLLEQSPQFLSIQEGENLTVYCNSSSVFSSLQWYRQEPGEGPVLLVTVVTGGEVKKLKRLTFQFGDARKDSSLHITAAQPGDTGLYLCAEDNNDMRFGAGTRLTVKPNIQNPDPAVYQLRDSKSSDKSVCLFTDFDSQTNVSQSKDSDVYITDKTVLDMRSMDFKSNSAVAWSNKSDFACANAFNNSIIPEDTFFPSPESSCDVKLVEKSFETDTNLNFQNLSVIGFRILLLKVAGFNLLMTLRLWS

SEQ ID NO: 414 - protein, 311 aa, Homo sapiens
MGPQLLGYVVLCLLGAGPLEAQVTQNPRYLITVTGKKLTVTCSQNMNHEYMSWYRQDPGLGLRQIYYSMNVEVTDKGDVPEGYKVSRKEKRNFPLILESPSPNQTSLYFCASRGQGARETQYFGPGTRLLVLEDLKNVFPPEVAVFEPSEAEISHTQKATLVCLATGFYPDHVELSWWVNGKEVHSGVSTDPQPLKEQPALNDSRYCLSSRLRVSATFWQNPRNHFRCQVQFYGLSENDEWTQDRAKPVTQIVSAEAWGRADCGFTSESYQQGVLSATILYEILLGKATLYAVLVSALVLMAMVKRKDSRG

SEQ ID NO: 415 - protein, 268 aa, Homo sapiens
MRQVARVIVFLTLSTLSLAKTTQPISMDSYEGQEVNITCSHNNIATNDYITWYQQFPSQGPRFIIQGYKTKVTNEVASLFIPADRKSSTLSLPRVSLSDTAVYYCLVGESNQGGKLIFGQGTELSVKPNIQNPDPAVYQLRDSKSSDKSVCLFTDFDSQTNVSQSKDSDVYITDKTVLDMRSMDFKSNSAVAWSNKSDFACANAFNNSIIPEDTFFPSPESSCDVKLVEKSFETDTNLNFQNLSVIGFRILLLKVAGFNLLMTLRLWS

SEQ ID NO: 416 - protein, 315 aa, Homo sapiens
MGCRLLCCAVLCLLGAVPIDTEVTQTPKHLVMGMTNKKSLKCEQHMGHRAMYWYKQKAKKPPELMFVYSYEKLSINESVPSRFSPECPNSSLLNLHLHALQPEDSALYLCASSQLAKDRGRGETQYFGPGTRLLVLEDLKNVFPPEVAVFEPSEAEISHTQKATLVCLATGFYPDHVELSWWVNGKEVHSGVSTDPQPLKEQPALNDSRYCLSSRLRVSATFWQNPRNHFRCQVQFYGLSENDEWTQDRAKPVTQIVSAEAWGRADCGFTSESYQQGVLSATILYEILLGKATLYAVLVSALVLMAMVKRKDSRG

SEQ ID NO: 417 - protein, 274 aa, Homo sapiens
MEKMLECAFIVLWLQLGWLSGEDQVTQSPEALRLQEGESSSLNCSYTVSGLRGLFWYRQDPGKGPEFLFTLYSAGEEKEKERLKATLTKKESFLHITAPKPEDSATYLCAVQAGWDSGNTPLVFGKGTRLSVIANIQNPDPAVYQLRDSKSSDKSVCLFTDFDSQTNVSQSKDSDVYITDKTVLDMRSMDFKSNSAVAWSNKSDFACANAFNNSIIPEDTFFPSPESSCDVKLVEKSFETDTNLNFQNLSVIGFRILLLKVAGFNLLMTLRLWS

SEQ ID NO: 418 - protein, 308 aa, Homo sapiens
MGPGLLCWALLCLLGAGLVDAGVTQSPTHLIKTRGQQVTLRCSPKSGHDTVSWYQQALGQGPQFIFQYYEEEERQRGNFPDRFSGHQFPNYSSELNVNALLLGDSALYLCASSLDENTEAFFGQGTRLTVVEDLNKVFPPEVAVFEPSEAEISHTQKATLVCLATGFFPDHVELSWWVNGKEVHSGVSTDPQPLKEQPALNDSRYCLSSRLRVSATFWQNPRNHFRCQVQFYGLSENDEWTQDRAKPVTQIVSAEAWGRADCGFTSVSYQQGVLSATILYEILLGKATLYAVLVSALVLMAMVKRKDF

SEQ ID NO: 419 - protein, 272 aa, Homo sapiens
MEKMLECAFIVLWLQLGWLSGEDQVTQSPEALRLQEGESSSLNCSYTVSGLRGLFWYRQDPGKGPEFLFTLYSAGEEKEKERLKATLTKKESFLHITAPKPEDSATYLCAVRGFSDGQKLLFARGTMLKVDLNIQNPDPAVYQLRDSKSSDKSVCLFTDFDSQTNVSQSKDSDVYITDKTVLDMRSMDFKSNSAVAWSNKSDFACANAFNNSIIPEDTFFPSPESSCDVKLVEKSFETDTNLNFQNLSVIGFRILLLKVAGFNLLMTLRLWS

SEQ ID NO: 420 - protein, 322 aa, Homo sapiens
MLLLLLLLGPGISLLLPGSLAGSGLGAVVSQHPSWVICKSGTSVKIECRSLDFQATTMFWYRQFPKQSLMLMATSNEGSKATYEQGVEKDKFLINHASLTLSTLTVTSAHPEDSSFYICSARAGRGLGDIEQYFGPGTRLTVTEDLKNVFPPEVAVFEPSEAEISHTQKATLVCLATGFYPDHVELSWWVNGKEVHSGVSTDPQPLKEQPALNDSRYCLSSRLRVSATFWQNPRNHFRCQVQFYGLSENDEWTQDRAKPVTQIVSAEAWGRADCGFTSESYQQGVLSATILYEILLGKATLYAVLVSALVLMAMVKRKDSRG

SEQ ID NO: 421 - protein, 271 aa, Homo sapiens
METLLGVSLVILWLQLARVNSQQGEEDPQALSIQEGENATMNCSYKTSINNLQWYRQNSGRGLVHLILIRSNEREKHSGRLRVTLDTSKKSSSLLITASRAADTASYFCATRSGGSYIPTFGRGTSLIVHPYIQNPDPAVYQLRDSKSSDKSVCLFTDFDSQTNVSQSKDSDVYITDKTVLDMRSMDFKSNSAVAWSNKSDFACANAFNNSIIPEDTFFPSPESSCDVKLVEKSFETDTNLNFQNLSVIGFRILLLKVAGFNLLMTLRLWS

SEQ ID NO: 422 - protein, 310 aa, Homo sapiens
MGPGLLCWALLCLLGAGLVDAGVTQSPTHLIKTRGQQVTLRCSPKSGHDTVSWYQQALGQGPQFIFQYYEEEERQRGNFPDRFSGHQFPNYSSELNVNALLLGDSALYLCASSLNREETQYFGPGTRLLVLEDLKNVFPPEVAVFEPSEAEISHTQKATLVCLATGFYPDHVELSWWVNGKEVHSGVSTDPQPLKEQPALNDSRYCLSSRLRVSATFWQNPRNHFRCQVQFYGLSENDEWTQDRAKPVTQIVSAEAWGRADCGFTSESYQQGVLSATILYEILLGKATLYAVLVSALVLMAMVKRKDSRG

SEQ ID NO: 423 - protein, 270 aa, Homo sapiens
METLLGVSLVILWLQLARVNSQQGEEDPQALSIQEGENATMNCSYKTSINNLQWYRQNSGRGLVHLILIRSNEREKHSGRLRVTLDTSKKSSSLLITASRAADTASYFCATARGDDKIIFGKGTRLHILPNIQNPDPAVYQLRDSKSSDKSVCLFTDFDSQTNVSQSKDSDVYITDKTVLDMRSMDFKSNSAVAWSNKSDFACANAFNNSIIPEDTFFPSPESSCDVKLVEKSFETDTNLNFQNLSVIGFRILLLKVAGFNLLMTLRLWS

SEQ ID NO: 424 - protein, 306 aa, Homo sapiens
MGPQLLGYVVLCLLGAGPLEAQVTQNPRYLITVTGKKLTVTCSQNMNHEYMSWYRQDPGLGLRQIYYSMNVEVTDKGDVPEGYKVSRKEKRNFPLILESPSPNQTSLYFCASNTGSEAFFGQGTRLTVVEDLNKVFPPEVAVFEPSEAEISHTQKATLVCLATGFFPDHVELSWWVNGKEVHSGVSTDPQPLKEQPALNDSRYCLSSRLRVSATFWQNPRNHFRCQVQFYGLSENDEWTQDRAKPVTQIVSAEAWGRADCGFTSVSYQQGVLSATILYEILLGKATLYAVLVSALVLMAMVKRKDF

SEQ ID NO: 425 - protein, 272 aa, Homo sapiens
MNYSPGLVSLILLLLGRTRGNSVTQMEGPVTLSEEAFLTINCTYTATGYPSLFWYVQYPGEGLQLLLKATKADDKGSNKGFEATYRKETTSFHLEKGSVQVSDSAVYFCALTPGGSNYKLTFGKGTLLTVNPNIQNPDPAVYQLRDSKSSDKSVCLFTDFDSQTNVSQSKDSDVYITDKTVLDMRSMDFKSNSAVAWSNKSDFACANAFNNSIIPEDTFFPSPESSCDVKLVEKSFETDTNLNFQNLSVIGFRILLLKVAGFNLLMTLRLWS

SEQ ID NO: 426 - protein, 317 aa, Homo sapiens
MLLLLLLLGPGISLLLPGSLAGSGLGAVVSQHPSWVICKSGTSVKIECRSLDFQATTMFWYRQFPKQSLMLMATSNEGSKATYEQGVEKDKFLINHASLTLSTLTVTSAHPEDSSFYICSARGTGKTEAFFGQGTRLTVVEDLNKVFPPEVAVFEPSEAEISHTQKATLVCLATGFFPDHVELSWWVNGKEVHSGVSTDPQPLKEQPALNDSRYCLSSRLRVSATFWQNPRNHFRCQVQFYGLSENDEWTQDRAKPVTQIVSAEAWGRADCGFTSVSYQQGVLSATILYEILLGKATLYAVLVSALVLMAMVKRKDF

SEQ ID NO: 427 - protein, 278 aa, Homo sapiens
MAMLLGASVLILWLQPDWVNSQQKNDDQQVKQNSPSLSVQEGRISILNCDYTNSMFDYFLWYKKYPAEGPTFLISISSIKDKNEDGRFTVFLNKSAKHLSLHIVPSQPGDSAVYFCAASEYVGNQFYFGTGTSLTVIPNIQNPDPAVYQLRDSKSSDKSVCLFTDFDSQTNVSQSKDSDVYITDKTVLDMRSMDFKSNSAVAWSNKSDFACANAFNNSIIPEDTFFPSPESSCDVKLVEKSFETDTNLNFQNLSVIGFRILLLKVAGFNLLMTLRLWS

SEQ ID NO: 428 - protein, 313 aa, Homo sapiens
MGTSLLCWMALCLLGADHADTGVSQNPRHKITKRGQNVTFRCDPISEHNRLYWYRQTLGQGPEFLTYFQNEAQLEKSRLLSDRFSAERPKGSFSTLEIQRTEQGDSAMYLCASSPMLAGVPEQYFGPGTRLTVTEDLKNVFPPEVAVFEPSEAEISHTQKATLVCLATGFYPDHVELSWWVNGKEVHSGVSTDPQPLKEQPALNDSRYCLSSRLRVSATFWQNPRNHFRCQVQFYGLSENDEWTQDRAKPVTQIVSAEAWGRADCGFTSESYQQGVLSATILYEILLGKATLYAVLVSALVLMAMVKRKDSRG

SEQ ID NO: 429 - protein, 266 aa, Homo sapiens
MWGVFLLYVSMKMGGTTGQNIDQPTEMTATEGAIVQINCTYQTSGFNGLFWYQQHAGEAPTFLSYNVLDGLEEKGRFSSFLSRSKGYSYLLLKELQMKDSASYLCAVKDSNYQLIWGAGTKLIIKPDIQNPDPAVYQLRDSKSSDKSVCLFTDFDSQTNVSQSKDSDVYITDKTVLDMRSMDFKSNSAVAWSNKSDFACANAFNNSIIPEDTFFPSPESSCDVKLVEKSFETDTNLNFQNLSVIGFRILLLKVAGFNLLMTLRLWS

SEQ ID NO: 430 - protein, 312 aa, Homo sapiens
MSLGLLCCGAFSLLWAGPVNAGVTQTPKFRVLKTGQSMTLLCAQDMNHEYMYWYRQDPGMGLRLIHYSVGEGTTAKGEVPDGYNVSRLKKQNFLLGLESAAPSQTSVYFCASSWSGSGPDTQYFGPGTRLTVLEDLKNVFPPEVAVFEPSEAEISHTQKATLVCLATGFYPDHVELSWWVNGKEVHSGVSTDPQPLKEQPALNDSRYCLSSRLRVSATFWQNPRNHFRCQVQFYGLSENDEWTQDRAKPVTQIVSAEAWGRADCGFTSESYQQGVLSATILYEILLGKATLYAVLVSALVLMAMVKRKDSRG

SEQ ID NO: 431 - protein, 273 aa, Homo sapiens
MASAPISMLAMLFTLSGLRAQSVAQPEDQVNVAEGNPLTVKCTYSVSGNPYLFWYVQYPNRGLQFLLKYITGDNLVKGSYGFEAEFNKSQTSFHLKKPSALVSDSALYFCAVRVPRYNNDMRFGAGTRLTVKPNIQNPDPAVYQLRDSKSSDKSVCLFTDFDSQTNVSQSKDSDVYITDKTVLDMRSMDFKSNSAVAWSNKSDFACANAFNNSIIPEDTFFPSPESSCDVKLVEKSFETDTNLNFQNLSVIGFRILLLKVAGFNLLMTLRLWS

SEQ ID NO: 432 - protein, 314 aa, Homo sapiens
MGCRLLCCAVLCLLGAGELVPMETGVTQTPRHLVMGMTNKKSLKCEQHLGHNAMYWYKQSAKKPLELMFVYSLEERVENNSVPSRFSPECPNSSHLFLHLHTLQPEDSALYLCASSQDLRNSNQPQHFGDGTRLSILEDLNKVFPPEVAVFEPSEAEISHTQKATLVCLATGFFPDHVELSWWVNGKEVHSGVSTDPQPLKEQPALNDSRYCLSSRLRVSATFWQNPRNHFRCQVQFYGLSENDEWTQDRAKPVTQIVSAEAWGRADCGFTSVSYQQGVLSATILYEILLGKATLYAVLVSALVLMAMVKRKDF

SEQ ID NO: 433 - protein, 274 aa, Homo sapiens
MESFLGGVLLILWLQVDWVKSQKIEQNSEALNIQEGKTATLTCNYTNYSPAYLQWYRQDPGRGPVFLLLIRENEKEKRKERLKVTFDTTLKQSLFHITASQPADSATYLCALDAGGTSYGKLTFGQGTILTVHPNIQNPDPAVYQLRDSKSSDKSVCLFTDFDSQTNVSQSKDSDVYITDKTVLDMRSMDFKSNSAVAWSNKSDFACANAFNNSIIPEDTFFPSPESSCDVKLVEKSFETDTNLNFQNLSVIGFRILLLKVAGFNLLMTLRLWS

SEQ ID NO: 434 - protein, 311 aa, Homo sapiens
MGTSLLCWVVLGFLGTDHTGAGVSQSPRYKVTKRGQDVALRCDPISGHVSLYWYRQALGQGPEFLTYFNYEAQQDKSGLPNDRFSAERPEGSISTLTIQRTEQRDSAMYRCASGLSSYNEQFFGPGTRLTVLEDLKNVFPPEVAVFEPSEAEISHTQKATLVCLATGFYPDHVELSWWVNGKEVHSGVSTDPQPLKEQPALNDSRYCLSSRLRVSATFWQNPRNHFRCQVQFYGLSENDEWTQDRAKPVTQIVSAEAWGRADCGFTSESYQQGVLSATILYEILLGKATLYAVLVSALVLMAMVKRKDSRG

SEQ ID NO: 435 - protein, 270 aa, Homo sapiens
MAGIRALFMYLWLQLDWVSRGESVGLHLPTLSVQEGDNSIINCAYSNSASDYFIWYKQESGKGPQFIIDIRSNMDKRQGQRVTVLLNKTVKHLSLQIAATQPGDSAVYFCAEDSSYKLIFGSGTRLLVRPDIQNPDPAVYQLRDSKSSDKSVCLFTDFDSQTNVSQSKDSDVYITDKTVLDMRSMDFKSNSAVAWSNKSDFACANAFNNSIIPEDTFFPSPESSCDVKLVEKSFETDTNLNFQNLSVIGFRILLLKVAGFNLLMTLRLWS

SEQ ID NO: 436 - protein, 315 aa, Homo sapiens
MSNQVLCCVVLCFLGANTVDGGITQSPKYLFRKEGQNVTLSCEQNLNHDAMYWYRQDPGQGLRLIYYSQIVNDFQKGDIAEGYSVSREKKESFPLTVTSAQKNPTAFYLCASSPTNGGLAGVDEQYFGPGTRLTVTEDLKNVFPPEVAVFEPSEAEISHTQKATLVCLATGFYPDHVELSWWVNGKEVHSGVSTDPQPLKEQPALNDSRYCLSSRLRVSATFWQNPRNHFRCQVQFYGLSENDEWTQDRAKPVTQIVSAEAWGRADCGFTSESYQQGVLSATILYEILLGKATLYAVLVSALVLMAMVKRKDSRG

SEQ ID NO: 437 - protein, 274 aa, Homo sapiens
MEKNPLAAPLLILWFHLDCVSSILNVEQSPQSLHVQEGDSTNFTCSFPSSNFYALHWYRWETAKSPEALFVMTLNGDEKKKGRISATLNTKEGYSYLYIKGSQPEDSATYLCAFRESDGQKLLFARGTMLKVDLNIQNPDPAVYQLRDSKSSDKSVCLFTDFDSQTNVSQSKDSDVYITDKTVLDMRSMDFKSNSAVAWSNKSDFACANAFNNSIIPEDTFFPSPESSCDVKLVEKSFETDTNLNFQNLSVIGFRILLLKVAGFNLLMTLRLWS

SEQ ID NO: 438 - protein, 312 aa, Homo sapiens
MGTSLLCWMALCLLGADHADTGVSQNPRHKITKRGQNVTFRCDPISEHNRLYWYRQTLGQGPEFLTYFQNEAQLEKSRLLSDRFSAERPKGSFSTLEIQRTEQGDSAMYLCASSPSGFRETQYFGPGTRLLVLEDLKNVFPPEVAVFEPSEAEISHTQKATLVCLATGFYPDHVELSWWVNGKEVHSGVSTDPQPLKEQPALNDSRYCLSSRLRVSATFWQNPRNHFRCQVQFYGLSENDEWTQDRAKPVTQIVSAEAWGRADCGFTSESYQQGVLSATILYEILLGKATLYAVLVSALVLMAMVKRKDSRG

SEQ ID NO: 439 - protein, 274 aa, Homo sapiens
MMKCPQALLAIFWLLLSWVSSEDKVVQSPLSLVVHEGDTVTLNCSYEVTNFRSLLWYKQEKKAPTFLFMLTSSGIEKKSGRLSSILDKKELSSILNITATQTGDSAIYLCAVRNSGGSNYKLTFGKGTLLTVNPNIQNPDPAVYQLRDSKSSDKSVCLFTDFDSQTNVSQSKDSDVYITDKTVLDMRSMDFKSNSAVAWSNKSDFACANAFNNSIIPEDTFFPSPESSCDVKLVEKSFETDTNLNFQNLSVIGFRILLLKVAGFNLLMTLRLWS

SEQ ID NO: 440 - protein, 309 aa, Homo sapiens
MGTRLLCWAALCLLGAELTEAGVAQSPRYKIIEKRQSVAFWCNPISGHATLYWYQQILGQGPKLLIQFQNNGVVDDSQLPKDRFSAERLKGVDSTLKIQPAKLEDSAVYLCASSLVLWTGYTFGSGTRLTVVEDLNKVFPPEVAVFEPSEAEISHTQKATLVCLATGFFPDHVELSWWVNGKEVHSGVSTDPQPLKEQPALNDSRYCLSSRLRVSATFWQNPRNHFRCQVQFYGLSENDEWTQDRAKPVTQIVSAEAWGRADCGFTSVSYQQGVLSATILYEILLGKATLYAVLVSALVLMAMVKRKDF

SEQ ID NO: 441 - protein, 276 aa, Homo sapiens
MSLSSLLKVVTASLWLGPGIAQKITQTQPGMFVQEKEAVTLDCTYDTSDPSYGLFWYKQPSSGEMIFLIYQGSYDQQNATEGRYSLNFQKARKSANLVISASQLGDSAMYFCAMREYTGANSKLTFGKGITLSVRPDIQNPDPAVYQLRDSKSSDKSVCLFTDFDSQTNVSQSKDSDVYITDKTVLDMRSMDFKSNSAVAWSNKSDFACANAFNNSIIPEDTFFPSPESSCDVKLVEKSFETDTNLNFQNLSVIGFRILLLKVAGFNLLMTLRLWS

SEQ ID NO: 442 - protein, 319 aa, Homo sapiens
MGTRLLCWVVLGFLGTDHTGAGVSQSPRYKVAKRGQDVALRCDPISGHVSLFWYQQALGQGPEFLTYFQNEAQLDKSGLPSDRFFAERPEGSVSTLKIQRTQQEDSAVYLCASSLGGQRERPLGPTDTQYFGPGTRLTVLEDLKNVFPPEVAVFEPSEAEISHTQKATLVCLATGFYPDHVELSWWVNGKEVHSGVSTDPQPLKEQPALNDSRYCLSSRLRVSATFWQNPRNHFRCQVQFYGLSENDEWTQDRAKPVTQIVSAEAWGRADCGFTSESYQQGVLSATILYEILLGKATLYAVLVSALVLMAMVKRKDSRG

SEQ ID NO: 443 - protein, 274 aa, Homo sapiens
MEKNPLAAPLLILWFHLDCVSSILNVEQSPQSLHVQEGDSTNFTCSFPSSNFYALHWYRWETAKSPEALFVMTLNGDEKKKGRISATLNTKEGYSYLYIKGSQPEDSATYLCAFLLSDGQKLLFARGTMLKVDLNIQNPDPAVYQLRDSKSSDKSVCLFTDFDSQTNVSQSKDSDVYITDKTVLDMRSMDFKSNSAVAWSNKSDFACANAFNNSIIPEDTFFPSPESSCDVKLVEKSFETDTNLNFQNLSVIGFRILLLKVAGFNLLMTLRLWS

SEQ ID NO: 444 - protein, 310 aa, Homo sapiens
MGTSLLCWMALCLLGADHADTGVSQNPRHKITKRGQNVTFRCDPISEHNRLYWYRQTLGQGPEFLTYFQNEAQLEKSRLLSDRFSAERPKGSFSTLEIQRTEQGDSAMYLCASSPAGANQPQHFGDGTRLSILEDLNKVFPPEVAVFEPSEAEISHTQKATLVCLATGFFPDHVELSWWVNGKEVHSGVSTDPQPLKEQPALNDSRYCLSSRLRVSATFWQNPRNHFRCQVQFYGLSENDEWTQDRAKPVTQIVSAEAWGRADCGFTSVSYQQGVLSATILYEILLGKATLYAVLVSALVLMAMVKRKDF

SEQ ID NO: 445 - protein, 273 aa, Homo sapiens
MLTASLLRAVIASICVVSSMAQKVTQAQTEISVVEKEDVTLDCVYETRDTTYYLFWYKQPPSGELVFLIRRNSFDEQNEISGRYSWNFQKSTSSFNFTITASQVVDSAVYFCALLNSGYALNFGKGTSLLVTPHIQNPDPAVYQLRDSKSSDKSVCLFTDFDSQTNVSQSKDSDVYITDKTVLDMRSMDFKSNSAVAWSNKSDFACANAFNNSIIPEDTFFPSPESSCDVKLVEKSFETDTNLNFQNLSVIGFRILLLKVAGFNLLMTLRLWS

SEQ ID NO: 446 - protein, 311 aa, Homo sapiens
MGFRLLCCVAFCLLGAGPVDSGVTQTPKHLITATGQRVTLRCSPRSGDLSVYWYQQSLDQGLQFLIQYYNGEERAKGNILERFSAQQFPDLHSELNLSSLELGDSALYFCASSVAGVQETQYFGPGTRLLVLEDLKNVFPPEVAVFEPSEAEISHTQKATLVCLATGFYPDHVELSWWVNGKEVHSGVSTDPQPLKEQPALNDSRYCLSSRLRVSATFWQNPRNHFRCQVQFYGLSENDEWTQDRAKPVTQIVSAEAWGRADCGFTSESYQQGVLSATILYEILLGKATLYAVLVSALVLMAMVKRKDSRG

SEQ ID NO: 447 - protein, 279 aa, Homo sapiens
MAMLLGASVLILWLQPDWVNSQQKNDDQQVKQNSPSLSVQEGRISILNCDYTNSMFDYFLWYKKYPAEGPTFLISISSIKDKNEDGRFTVFLNKSAKHLSLHIVPSQPGDSAVYFCAAGSGGSNYKLTFGKGTLLTVNPNIQNPDPAVYQLRDSKSSDKSVCLFTDFDSQTNVSQSKDSDVYITDKTVLDMRSMDFKSNSAVAWSNKSDFACANAFNNSIIPEDTFFPSPESSCDVKLVEKSFETDTNLNFQNLSVIGFRILLLKVAGFNLLMTLRLWS

SEQ ID NO: 448 - protein, 313 aa, Homo sapiens
MGTSLLCWMALCLLGADHADTGVSQNPRHKITKRGQNVTFRCDPISEHNRLYWYRQTLGQGPEFLTYFQNEAQLEKSRLLSDRFSAERPKGSFSTLEIQRTEQGDSAMYLCASSLALEPGDTQYFGPGTRLTVLEDLKNVFPPEVAVFEPSEAEISHTQKATLVCLATGFYPDHVELSWWVNGKEVHSGVSTDPQPLKEQPALNDSRYCLSSRLRVSATFWQNPRNHFRCQVQFYGLSENDEWTQDRAKPVTQIVSAEAWGRADCGFTSESYQQGVLSATILYEILLGKATLYAVLVSALVLMAMVKRKDSRG

SEQ ID NO: 449 - protein, 271 aa, Homo sapiens
METLLGLLILWLQLQWVSSKQEVTQIPAALSVPEGENLVLNCSFTDSAIYNLQWFRQDPGKGLTSLLLIQSSQREQTSGRLNASLDKSSGRSTLYIAASQPGDSATYLCAAQNDNNARLMFGDGTQLVVKPNIQNPDPAVYQLRDSKSSDKSVCLFTDFDSQTNVSQSKDSDVYITDKTVLDMRSMDFKSNSAVAWSNKSDFACANAFNNSIIPEDTFFPSPESSCDVKLVEKSFETDTNLNFQNLSVIGFRILLLKVAGFNLLMTLRLWS

SEQ ID NO: 450 - protein, 314 aa, Homo sapiens
MGSRLLCWVLLCLLGAGPVKAGVTQTPRYLIKTRGQQVTLSCSPISGHRSVSWYQQTPGQGLQFLFEYFSETQRNKGNFPGRFSGRQFSNSRSEMNVSTLELGDSALYLCASSLAGVPFSYNEQFFGPGTRLTVLEDLKNVFPPEVAVFEPSEAEISHTQKATLVCLATGFYPDHVELSWWVNGKEVHSGVSTDPQPLKEQPALNDSRYCLSSRLRVSATFWQNPRNHFRCQVQFYGLSENDEWTQDRAKPVTQIVSAEAWGRADCGFTSESYQQGVLSATILYEILLGKATLYAVLVSALVLMAMVKRKDSRG

SEQ ID NO: 451 - protein, 265 aa, Homo sapiens
MWGAFLLYVSMKMGGTAGQSLEQPSEVTAVEGAIVQINCTYQTSGFYGLSWYQQHDGGAPTFLSYNALDGLEETGRFSSFLSRSDSYGYLLLQELQMKDSASYFCAAPAFQKLVFGTGTRLLVSPNIQNPDPAVYQLRDSKSSDKSVCLFTDFDSQTNVSQSKDSDVYITDKTVLDMRSMDFKSNSAVAWSNKSDFACANAFNNSIIPEDTFFPSPESSCDVKLVEKSFETDTNLNFQNLSVIGFRILLLKVAGFNLLMTLRLWS

SEQ ID NO: 452 - protein, 314 aa, Homo sapiens
MGFRLLCCVAFCLLGAGPVDSGVTQTPKHLITATGQRVTLRCSPRSGDLSVYWYQQSLDQGLQFLIQYYNGEERAKGNILERFSAQQFPDLHSELNLSSLELGDSALYFCASSENLNRDARGNYGYTFGSGTRLTVVEDLNKVFPPEVAVFEPSEAEISHTQKATLVCLATGFFPDHVELSWWVNGKEVHSGVSTDPQPLKEQPALNDSRYCLSSRLRVSATFWQNPRNHFRCQVQFYGLSENDEWTQDRAKPVTQIVSAEAWGRADCGFTSVSYQQGVLSATILYEILLGKATLYAVLVSALVLMAMVKRKDF

SEQ ID NO: 453 - protein, 270 aa, Homo sapiens
METLLGLLILWLQLQWVSSKQEVTQIPAALSVPEGENLVLNCSFTDSAIYNLQWFRQDPGKGLTSLLLIQSSQREQTSGRLNASLDKSSGRSTLYIAASQPGDSATYLCAVKTSYDKVIFGPGTSLSVIPNIQNPDPAVYQLRDSKSSDKSVCLFTDFDSQTNVSQSKDSDVYITDKTVLDMRSMDFKSNSAVAWSNKSDFACANAFNNSIIPEDTFFPSPESSCDVKLVEKSFETDTNLNFQNLSVIGFRILLLKVAGFNLLMTLRLWS

SEQ ID NO: 454 - protein, 307 aa, Homo sapiens
MLSLLLLLLGLGSVFSAVISQKPSRDICQRGTSLTIQCQVDSQVTMMFWYRQQPGQSLTLIATANQGSEATYESGFVIDKFPISRPNLTFSTLTVSNMSPEDSSIYLCSVASGAYEQYFGPGTRLTVTEDLKNVFPPEVAVFEPSEAEISHTQKATLVCLATGFYPDHVELSWWVNGKEVHSGVSTDPQPLKEQPALNDSRYCLSSRLRVSATFWQNPRNHFRCQVQFYGLSENDEWTQDRAKPVTQIVSAEAWGRADCGFTSESYQQGVLSATILYEILLGKATLYAVLVSALVLMAMVKRKDSRG

SEQ ID NO: 455 - protein, 269 aa, Homo sapiens
MVLKFSVSILWIQLAWVSTQLLEQSPQFLSIQEGENLTVYCNSSSVFSSLQWYRQEPGEGPVLLVTVVTGGEVKKLKRLTFQFGDARKDSSLHITAAQPGDTGLYLCFFPHWSDKLIFGTGTRLQVFPNIIQNPDPAVYQLRDSKSSDKSVCLFTDFDSQTNVSQSKDSDVYITDKTVLDMRSMDFKSNSAVAWSNKSDFACANAFNNSIIPEDTFFPSPESSCDVKLVEKSFETDTNLNFQNLSVIGFRILLLKVAGFNLLMTLRLWS

SEQ ID NO: 456 - protein, 307 aa, Homo sapiens
MGSRLLCWVLLCLLGAGPVKAGVTQTPRYLIKTRGQQVTLSCSPISGHRSVSWYQQTPGQGLQFLFEYFSETQRNKGNFPGRFSGRQFSNSRSEMNVSTLELGDSALYLCASRTGNTEAFFGQGTRLTVVEDLNKVFPPEVAVFEPSEAEISHTQKATLVCLATGFFPDHVELSWWVNGKEVHSGVSTDPQPLKEQPALNDSRYCLSSRLRVSATFWQNPRNHFRCQVQFYGLSENDEWTQDRAKPVTQIVSAEAWGRADCGFTSVSYQQGVLSATILYEILLGKATLYAVLVSALVLMAMVKRKDF

SEQ ID NO: 457 - protein, 271 aa, Homo sapiens
MISLRVLLVILWLQLSWVWSQRKEVEQDPGPFNVPEGATVAFNCTYSNSASQSFFWYRQDCRKEPKLLMSVYSSGNEDGRFTAQLNRASQYISLLIRDSKLSDSATYLCSVGYSSASKIIFGSGTRLSIRPNIQNPDPAVYQLRDSKSSDKSVCLFTDFDSQTNVSQSKDSDVYITDKTVLDMRSMDFKSNSAVAWSNKSDFACANAFNNSIIPEDTFFPSPESSCDVKLVEKSFETDTNLNFQNLSVIGFRILLLKVAGFNLLMTLRLWS

SEQ ID NO: 458 - protein, 320 aa, Homo sapiens
MLSPDLPDSAWNTRLLCHVMLCLLGAVSVAAGVIQSPRHLIKEKRETATLKCYPIPRHDTVYWYQQGPGQDPQFLISFYEKMQSDKGSIPDRFSAQQFSDYHSELNMSSLELGDSALYFCASSSQSRETQYFGPGTRLLVLEDLKNVFPPEVAVFEPSEAEISHTQKATLVCLATGFYPDHVELSWWVNGKEVHSGVSTDPQPLKEQPALNDSRYCLSSRLRVSATFWQNPRNHFRCQVQFYGLSENDEWTQDRAKPVTQIVSAEAWGRADCGFTSESYQQGVLSATILYEILLGKATLYAVLVSALVLMAMVKRKDSRG

SEQ ID NO: 459 - protein, 274 aa, Homo sapiens
MTRVSLLWAVVVSTCLESGMAQTVTQSQPEMSVQEAETVTLSCTYDTSENNYYLFWYKQPPSRQMILVIRQEAYKQQNATENRFSVNFQKAAKSFSLKISDSQLGDTAMYFCAFLRAAGNKLTFGGGTRVLVKPNIQNPDPAVYQLRDSKSSDKSVCLFTDFDSQTNVSQSKDSDVYITDKTVLDMRSMDFKSNSAVAWSNKSDFACANAFNNSIIPEDTFFPSPESSCDVKLVEKSFETDTNLNFQNLSVIGFRILLLKVAGFNLLMTLRLWS

SEQ ID NO: 460 - protein, 315 aa, Homo sapiens
MATRLLCCVVLCLLGEELIDARVTQTPRHKVTEMGQEVTMRCQPILGHNTVFWYRQTMMQGLELLAYFRNRAPLDDSGMPKDRFSAEMPDATLATLKIQPSEPRDSAVYFCASGLVSGQARKETQYFGPGTRLLVLEDLKNVFPPEVAVFEPSEAEISHTQKATLVCLATGFYPDHVELSWWVNGKEVHSGVSTDPQPLKEQPALNDSRYCLSSRLRVSATFWQNPRNHFRCQVQFYGLSENDEWTQDRAKPVTQIVSAEAWGRADCGFTSESYQQGVLSATILYEILLGKATLYAVLVSALVLMAMVKRKDSRG

SEQ ID NO: 461 - protein, 271 aa, Homo sapiens
MRQVARVIVFLTLSTLSLAKTTQPISMDSYEGQEVNITCSHNNIATNDYITWYQQFPSQGPRFIIQGYKTKVTNEVASLFIPADRKSSTLSLPRVSLSDTAVYYCLVGDIGDTGGFKTIFGAGTRLFVKANIIQNPDPAVYQLRDSKSSDKSVCLFTDFDSQTNVSQSKDSDVYITDKTVLDMRSMDFKSNSAVAWSNKSDFACANAFNNSIIPEDTFFPSPESSCDVKLVEKSFETDTNLNFQNLSVIGFRILLLKVAGFNLLMTLRLWS

SEQ ID NO: 462 - protein, 314 aa, Homo sapiens
MGTSLLCWMALCLLGADHADTGVSQNPRHKITKRGQNVTFRCDPISEHNRLYWYRQTLGQGPEFLTYFQNEAQLEKSRLLSDRFSAERPKGSFSTLEIQRTEQGDSAMYLCASSWTGLADTDTQYFGPGTRLTVLEDLKNVFPPEVAVFEPSEAEISHTQKATLVCLATGFYPDHVELSWWVNGKEVHSGVSTDPQPLKEQPALNDSRYCLSSRLRVSATFWQNPRNHFRCQVQFYGLSENDEWTQDRAKPVTQIVSAEAWGRADCGFTSESYQQGVLSATILYEILLGKATLYAVLVSALVLMAMVKRKDSRG

SEQ ID NO: 463 - protein, 271 aa, Homo sapiens
MTSIRAVFIFLWLQLDLVNGENVEQHPSTLSVQEGDSAVIKCTYSDSASNYFPWYKQELGKGPQLIIDIRSNVGEKKDQRIAVTLNKTAKHFSLHITETQPEDSAVYFCAASINSGYALNFGKGTSLLVTPHIQNPDPAVYQLRDSKSSDKSVCLFTDFDSQTNVSQSKDSDVYITDKTVLDMRSMDFKSNSAVAWSNKSDFACANAFNNSIIPEDTFFPSPESSCDVKLVEKSFETDTNLNFQNLSVIGFRILLLKVAGFNLLMTLRLWS

SEQ ID NO: 464 - protein, 309 aa, Homo sapiens
MSNQVLCCVVLCFLGANTVDGGITQSPKYLFRKEGQNVTLSCEQNLNHDAMYWYRQDPGQGLRLIYYSQIVNDFQKGDIAEGYSVSREKKESFPLTVTSAQKNPTAFYLCASSWGTDTQYFGPGTRLTVLEDLKNVFPPEVAVFEPSEAEISHTQKATLVCLATGFYPDHVELSWWVNGKEVHSGVSTDPQPLKEQPALNDSRYCLSSRLRVSATFWQNPRNHFRCQVQFYGLSENDEWTQDRAKPVTQIVSAEAWGRADCGFTSESYQQGVLSATILYEILLGKATLYAVLVSALVLMAMVKRKDSRG

SEQ ID NO: 465 - protein, 274 aa, Homo sapiens
MAGIRALFMYLWLQLDWVSRGESVGLHLPTLSVQEGDNSIINCAYSNSASDYFIWYKQESGKGPQFIIDIRSNMDKRQGQRVTVLLNKTVKHLSLQIAATQPGDSAVYFCAENIVNSGYSTLTFGKGTMLLVSPDIQNPDPAVYQLRDSKSSDKSVCLFTDFDSQTNVSQSKDSDVYITDKTVLDMRSMDFKSNSAVAWSNKSDFACANAFNNSIIPEDTFFPSPESSCDVKLVEKSFETDTNLNFQNLSVIGFRILLLKVAGFNLLMTLRLWS

SEQ ID NO: 466 - protein, 310 aa, Homo sapiens
MGSRLLCWVLLCLLGAGPVKAGVTQTPRYLIKTRGQQVTLSCSPISGHRSVSWYQQTPGQGLQFLFEYFSETQRNKGNFPGRFSGRQFSNSRSEMNVSTLELGDSALYLCASSLSPLGNQPQHFGDGTRLSILEDLNKVFPPEVAVFEPSEAEISHTQKATLVCLATGFFPDHVELSWWVNGKEVHSGVSTDPQPLKEQPALNDSRYCLSSRLRVSATFWQNPRNHFRCQVQFYGLSENDEWTQDRAKPVTQIVSAEAWGRADCGFTSVSYQQGVLSATILYEILLGKATLYAVLVSALVLMAMVKRKDF

SEQ ID NO: 467 - protein, 270 aa, Homo sapiens
MVKIRQFLLAILWLQLSCVSAAKNEVEQSPQNLTAQEGEFITINCSYSVGISALHWLQQHPGGGIVSLFMLSSGKKKHGRLIATINIQEKHSSLHITASHPRDSAVYICAVRSGGNQFYFGTGTSLTVIPNIQNPDPAVYQLRDSKSSDKSVCLFTDFDSQTNVSQSKDSDVYITDKTVLDMRSMDFKSNSAVAWSNKSDFACANAFNNSIIPEDTFFPSPESSCDVKLVEKSFETDTNLNFQNLSVIGFRILLLKVAGFNLLMTLRLWS

SEQ ID NO: 468 - protein, 304 aa, Homo sapiens
MLCSLLALLLGTFFGVRSQTIHQWPATLVQPVGSPLSLECTVEGTSNPNLYWYRQAAGRGLQLLFYSVGIGQISSEVPQNLSASRPQDRQFILSSKKLLLSDSGFYLCAWSAYWEGTFGSGTRLTVVEDLNKVFPPEVAVFEPSEAEISHTQKATLVCLATGFFPDHVELSWWVNGKEVHSGVSTDPQPLKEQPALNDSRYCLSSRLRVSATFWQNPRNHFRCQVQFYGLSENDEWTQDRAKPVTQIVSAEAWGRADCGFTSVSYQQGVLSATILYEILLGKATLYAVLVSALVLMAMVKRKDF

SEQ ID NO: 469 - protein, 279 aa, Homo sapiens
MAMLLGASVLILWLQPDWVNSQQKNDDQQVKQNSPSLSVQEGRISILNCDYTNSMFDYFLWYKKYPAEGPTFLISISSIKDKNEDGRFTVFLNKSAKHLSLHIVPSQPGDSAVYFCALHYSGTYKYIFGTGTRLKVLANIIQNPDPAVYQLRDSKSSDKSVCLFTDFDSQTNVSQSKDSDVYITDKTVLDMRSMDFKSNSAVAWSNKSDFACANAFNNSIIPEDTFFPSPESSCDVKLVEKSFETDTNLNFQNLSVIGFRILLLKVAGFNLLMTLRLWS

SEQ ID NO: 470 - protein, 309 aa, Homo sapiens
MGCRLLCCVVFCLLQAGPLDTAVSQTPKYLVTQMGNDKSIKCEQNLGHDTMYWYKQDSKKFLKIMFSYNNKELIINETVPNRFSPKSPDKAHLNLHINSLELGDSAVYFCASSQYRDEQFFGPGTRLTVLEDLKNVFPPEVAVFEPSEAEISHTQKATLVCLATGFYPDHVELSWWVNGKEVHSGVSTDPQPLKEQPALNDSRYCLSSRLRVSATFWQNPRNHFRCQVQFYGLSENDEWTQDRAKPVTQIVSAEAWGRADCGFTSESYQQGVLSATILYEILLGKATLYAVLVSALVLMAMVKRKDSRG

SEQ ID NO: 471 - protein, 275 aa, Homo sapiens
MKKHLTTFLVILWLYFYRGNGKNQVEQSPQSLIILEGKNCTLQCNYTVSPFSNLRWYKQDTGRGPVSLTIMTFSENTKSNGRYTATLDADTKQSSLHITASQLSDSASYICVVREFSGGYNKLIFGAGTRLAVHPYIQNPDPAVYQLRDSKSSDKSVCLFTDFDSQTNVSQSKDSDVYITDKTVLDMRSMDFKSNSAVAWSNKSDFACANAFNNSIIPEDTFFPSPESSCDVKLVEKSFETDTNLNFQNLSVIGFRILLLKVAGFNLLMTLRLWS

SEQ ID NO: 472 - protein, 308 aa, Homo sapiens
MSNQVLCCVVLCFLGANTVDGGITQSPKYLFRKEGQNVTLSCEQNLNHDAMYWYRQDPGQGLRLIYYSQIVNDFQKGDIAEGYSVSREKKESFPLTVTSAQKNPTAFYLCASDGSDLLPQHFGDGTRLSILEDLNKVFPPEVAVFEPSEAEISHTQKATLVCLATGFFPDHVELSWWVNGKEVHSGVSTDPQPLKEQPALNDSRYCLSSRLRVSATFWQNPRNHFRCQVQFYGLSENDEWTQDRAKPVTQIVSAEAWGRADCGFTSVSYQQGVLSATILYEILLGKATLYAVLVSALVLMAMVKRKDF

SEQ ID NO: 473 - protein, 273 aa, Homo sapiens
MTSIRAVFIFLWLQLDLVNGENVEQHPSTLSVQEGDSAVIKCTYSDSASNYFPWYKQELGKGPQLIIDIRSNVGEKKDQRIAVTLNKTAKHFSLHITETQPEDSAVYFCAASLGTGTASKLTFGTGTRLQVTLDIQNPDPAVYQLRDSKSSDKSVCLFTDFDSQTNVSQSKDSDVYITDKTVLDMRSMDFKSNSAVAWSNKSDFACANAFNNSIIPEDTFFPSPESSCDVKLVEKSFETDTNLNFQNLSVIGFRILLLKVAGFNLLMTLRLWS

SEQ ID NO: 474 - protein, 314 aa, Homo sapiens
MGCRLLCCAVLCLLGAGELVPMETGVTQTPRHLVMGMTNKKSLKCEQHLGHNAMYWYKQSAKKPLELMFVYSLEERVENNSVPSRFSPECPNSSHLFLHLHTLQPEDSALYLCASRGQGGGGELFFGEGSRLTVLEDLKNVFPPEVAVFEPSEAEISHTQKATLVCLATGFYPDHVELSWWVNGKEVHSGVSTDPQPLKEQPALNDSRYCLSSRLRVSATFWQNPRNHFRCQVQFYGLSENDEWTQDRAKPVTQIVSAEAWGRADCGFTSESYQQGVLSATILYEILLGKATLYAVLVSALVLMAMVKRKDSRG

SEQ ID NO: 475 - protein, 269 aa, Homo sapiens
MRQVARVIVFLTLSTLSLAKTTQPISMDSYEGQEVNITCSHNNIATNDYITWYQQFPSQGPRFIIQGYKTKVTNEVASLFIPADRKSSTLSLPRVSLSDTAVYYCLVVGGGGTYKYIFGTGTRLKVLANIIQNPDPAVYQLRDSKSSDKSVCLFTDFDSQTNVSQSKDSDVYITDKTVLDMRSMDFKSNSAVAWSNKSDFACANAFNNSIIPEDTFFPSPESSCDVKLVEKSFETDTNLNFQNLSVIGFRILLLKVAGFNLLMTLRLWS

SEQ ID NO: 476 - protein, 273 aa, Homo sapiens
MTSIRAVFIFLWLQLDLVNGENVEQHPSTLSVQEGDSAVIKCTYSDSASNYFPWYKQELGKGPQLIIDIRSNVGEKKDQRIAVTLNKTAKHFSLHITETQPEDSAVYFCAASRHVYNNNDMRFGAGTRLTVKPNIQNPDPAVYQLRDSKSSDKSVCLFTDFDSQTNVSQSKDSDVYITDKTVLDMRSMDFKSNSAVAWSNKSDFACANAFNNSIIPEDTFFPSPESSCDVKLVEKSFETDTNLNFQNLSVIGFRILLLKVAGFNLLMTLRLWS

SEQ ID NO: 477 - protein, 272 aa, Homo sapiens
MNYSPGLVSLILLLLGRTRGNSVTQMEGPVTLSEEAFLTINCTYTATGYPSLFWYVQYPGEGLQLLLKATKADDKGSNKGFEATYRKETTSFHLEKGSVQVSDSAVYFCARCGGGSNYKLTFGKGTLLTVNPNIQNPDPAVYQLRDSKSSDKSVCLFTDFDSQTNVSQSKDSDVYITDKTVLDMRSMDFKSNSAVAWSNKSDFACANAFNNSIIPEDTFFPSPESSCDVKLVEKSFETDTNLNFQNLSVIGFRILLLKVAGFNLLMTLRLWS

SEQ ID NO: 478 - protein, 9 aa, Severe acute respiratory syndrome coronavirus 2
YLQPRTFLL

SEQ ID NO: 479 - protein, 271 aa, Homo sapiens
MISLRVLLVILWLQLSWVWSQRKEVEQDPGPFNVPEGATVAFNCTYSNSASQSFFWYRQDCRKEPKLLMSVYSSGNEDGRFTAQLNRASQYISLLIRDSKLSDSATYLCVVNAEAGNMLTFGGGTRLMVKPHIQNPDPAVYQLRDSKSSDKSVCLFTDFDSQTNVSQSKDSDVYITDKTVLDMRSMDFKSNSAVAWSNKSDFACANAFNNSIIPEDTFFPSPESSCDVKLVEKSFETDTNLNFQNLSVIGFRILLLKVAGFNLLMTLRLWS

SEQ ID NO: 480 - protein, 310 aa, Homo sapiens
MSNQVLCCVVLCFLGANTVDGGITQSPKYLFRKEGQNVTLSCEQNLNHDAMYWYRQDPGQGLRLIYYSQIVNDFQKGDIAEGYSVSREKKESFPLTVTSAQKNPTAFYLCATQDTNTGELFFGEGSRLTVLEDLKNVFPPEVAVFEPSEAEISHTQKATLVCLATGFYPDHVELSWWVNGKEVHSGVSTDPQPLKEQPALNDSRYCLSSRLRVSATFWQNPRNHFRCQVQFYGLSENDEWTQDRAKPVTQIVSAEAWGRADCGFTSESYQQGVLSATILYEILLGKATLYAVLVSALVLMAMVKRKDSRG

SEQ ID NO: 481 - protein, 270 aa, Homo sapiens
MKSLRVLLVILWLQLSWVWSQQKEVEQNSGPLSVPEGAIASLNCTYSDRGSQSFFWYRQYSGKSPELIMFIYSNGDKEDGRFTAQLNKASQYVSLLIRDSQPSDSATYLCAVNRDDKIIFGKGTRLHILPNIQNPDPAVYQLRDSKSSDKSVCLFTDFDSQTNVSQSKDSDVYITDKTVLDMRSMDFKSNSAVAWSNKSDFACANAFNNSIIPEDTFFPSPESSCDVKLVEKSFETDTNLNFQNLSVIGFRILLLKVAGFNLLMTLRLWS

SEQ ID NO: 482 - protein, 309 aa, Homo sapiens
MGTSLLCWMALCLLGADHADTGVSQNPRHKITKRGQNVTFRCDPISEHNRLYWYRQTLGQGPEFLTYFQNEAQLEKSRLLSDRFSAERPKGSFSTLEIQRTEQGDSAMYLCASSPDIEQFFGPGTRLTVLEDLKNVFPPEVAVFEPSEAEISHTQKATLVCLATGFYPDHVELSWWVNGKEVHSGVSTDPQPLKEQPALNDSRYCLSSRLRVSATFWQNPRNHFRCQVQFYGLSENDEWTQDRAKPVTQIVSAEAWGRADCGFTSESYQQGVLSATILYEILLGKATLYAVLVSALVLMAMVKRKDSRG

SEQ ID NO: 483 - protein, 269 aa, Homo sapiens
MISLRVLLVILWLQLSWVWSQRKEVEQDPGPFNVPEGATVAFNCTYSNSASQSFFWYRQDCRKEPKLLMSVYSSGNEDGRFTAQLNRASQYISLLIRDSKLSDSATYLCVVNKEDKLSFGAGTTVTVRANIQNPDPAVYQLRDSKSSDKSVCLFTDFDSQTNVSQSKDSDVYITDKTVLDMRSMDFKSNSAVAWSNKSDFACANAFNNSIIPEDTFFPSPESSCDVKLVEKSFETDTNLNFQNLSVIGFRILLLKVAGFNLLMTLRLWS

SEQ ID NO: 484 - protein, 309 aa, Homo sapiens
MGTSLLCWMALCLLGADHADTGVSQNPRHKITKRGQNVTFRCDPISEHNRLYWYRQTLGQGPEFLTYFQNEAQLEKSRLLSDRFSAERPKGSFSTLEIQRTEQGDSAMYLCASSSEVGEFFGPGTRLTVLEDLKNVFPPEVAVFEPSEAEISHTQKATLVCLATGFYPDHVELSWWVNGKEVHSGVSTDPQPLKEQPALNDSRYCLSSRLRVSATFWQNPRNHFRCQVQFYGLSENDEWTQDRAKPVTQIVSAEAWGRADCGFTSESYQQGVLSATILYEILLGKATLYAVLVSALVLMAMVKRKDSRG

SEQ ID NO: 485 - protein, 272 aa, Homo sapiens
MISLRVLLVILWLQLSWVWSQRKEVEQDPGPFNVPEGATVAFNCTYSNSASQSFFWYRQDCRKEPKLLMSVYSSGNEDGRFTAQLNRASQYISLLIRDSKLSDSATYLCVVNFPSGNTPLVFGKGTRLSVIANIQNPDPAVYQLRDSKSSDKSVCLFTDFDSQTNVSQSKDSDVYITDKTVLDMRSMDFKSNSAVAWSNKSDFACANAFNNSIIPEDTFFPSPESSCDVKLVEKSFETDTNLNFQNLSVIGFRILLLKVAGFNLLMTLRLWS

SEQ ID NO: 486 - protein, 322 aa, Homo sapiens
MLLLLLLLGPGISLLLPGSLAGSGLGAVVSQHPSWVICKSGTSVKIECRSLDFQATTMFWYRQFPKQSLMLMATSNEGSKATYEQGVEKDKFLINHASLTLSTLTVTSAHPEDSSFYICSARDGLAQNTGELFFGEGSRLTVLEDLKNVFPPEVAVFEPSEAEISHTQKATLVCLATGFYPDHVELSWWVNGKEVHSGVSTDPQPLKEQPALNDSRYCLSSRLRVSATFWQNPRNHFRCQVQFYGLSENDEWTQDRAKPVTQIVSAEAWGRADCGFTSESYQQGVLSATILYEILLGKATLYAVLVSALVLMAMVKRKDSRG

SEQ ID NO: 487 - protein, 271 aa, Homo sapiens
MISLRVLLVILWLQLSWVWSQRKEVEQDPGPFNVPEGATVAFNCTYSNSASQSFFWYRQDCRKEPKLLMSVYSSGNEDGRFTAQLNRASQYISLLIRDSKLSDSATYLCVVNSADGQKLLFARGTMLKVDLNIQNPDPAVYQLRDSKSSDKSVCLFTDFDSQTNVSQSKDSDVYITDKTVLDMRSMDFKSNSAVAWSNKSDFACANAFNNSIIPEDTFFPSPESSCDVKLVEKSFETDTNLNFQNLSVIGFRILLLKVAGFNLLMTLRLWS

SEQ ID NO: 488 - protein, 310 aa, Homo sapiens
MSIGLLCCVAFSLLWASPVNAGVTQTPKFQVLKTGQSMTLQCAQDMNHNSMYWYRQDPGMGLRLIYYSASEGTTDKGEVPNGYNVSRLNKREFSLRLESAAPSQTSVYFCASSAWLQETQYFGPGTRLLVLEDLKNVFPPEVAVFEPSEAEISHTQKATLVCLATGFYPDHVELSWWVNGKEVHSGVSTDPQPLKEQPALNDSRYCLSSRLRVSATFWQNPRNHFRCQVQFYGLSENDEWTQDRAKPVTQIVSAEAWGRADCGFTSESYQQGVLSATILYEILLGKATLYAVLVSALVLMAMVKRKDSRG

SEQ ID NO: 489 - protein, 269 aa, Homo sapiens
MISLRVLLVILWLQLSWVWSQRKEVEQDPGPFNVPEGATVAFNCTYSNSASQSFFWYRQDCRKEPKLLMSVYSSGNEDGRFTAQLNRASQYISLLIRDSKLSDSATYLCVVNEGDDMRFGAGTRLTVKPNIQNPDPAVYQLRDSKSSDKSVCLFTDFDSQTNVSQSKDSDVYITDKTVLDMRSMDFKSNSAVAWSNKSDFACANAFNNSIIPEDTFFPSPESSCDVKLVEKSFETDTNLNFQNLSVIGFRILLLKVAGFNLLMTLRLWS

SEQ ID NO: 490 - protein, 311 aa, Homo sapiens
MGTSLLCWMALCLLGADHADTGVSQNPRHKITKRGQNVTFRCDPISEHNRLYWYRQTLGQGPEFLTYFQNEAQLEKSRLLSDRFSAERPKGSFSTLEIQRTEQGDSAMYLCASSEGNTGELFFGEGSRLTVLEDLKNVFPPEVAVFEPSEAEISHTQKATLVCLATGFYPDHVELSWWVNGKEVHSGVSTDPQPLKEQPALNDSRYCLSSRLRVSATFWQNPRNHFRCQVQFYGLSENDEWTQDRAKPVTQIVSAEAWGRADCGFTSESYQQGVLSATILYEILLGKATLYAVLVSALVLMAMVKRKDSRG

SEQ ID NO: 491 - protein, 272 aa, Homo sapiens
MKSLRVLLVILWLQLSWVWSQQKEVEQNSGPLSVPEGAIASLNCTYSDRGSQSFFWYRQYSGKSPELIMFIYSNGDKEDGRFTAQLNKASQYVSLLIRDSQPSDSATYLCAVNIKTDKLIFGTGTRLQVFPNIIQNPDPAVYQLRDSKSSDKSVCLFTDFDSQTNVSQSKDSDVYITDKTVLDMRSMDFKSNSAVAWSNKSDFACANAFNNSIIPEDTFFPSPESSCDVKLVEKSFETDTNLNFQNLSVIGFRILLLKVAGFNLLMTLRLWS

SEQ ID NO: 492 - protein, 311 aa, Homo sapiens
MGTSLLCWMALCLLGADHADTGVSQNPRHKITKRGQNVTFRCDPISEHNRLYWYRQTLGQGPEFLTYFQNEAQLEKSRLLSDRFSAERPKGSFSTLEIQRTEQGDSAMYLCARGAANTGELFFGEGSRLTVLEDLKNVFPPEVAVFEPSEAEISHTQKATLVCLATGFYPDHVELSWWVNGKEVHSGVSTDPQPLKEQPALNDSRYCLSSRLRVSATFWQNPRNHFRCQVQFYGLSENDEWTQDRAKPVTQIVSAEAWGRADCGFTSESYQQGVLSATILYEILLGKATLYAVLVSALVLMAMVKRKDSRG

SEQ ID NO: 493 - protein, 269 aa, Homo sapiens
MISLRVLLVILWLQLSWVWSQRKEVEQDPGPFNVPEGATVAFNCTYSNSASQSFFWYRQDCRKEPKLLMSVYSSGNEDGRFTAQLNRASQYISLLIRDSKLSDSATYLCVVNDLDDMRFGAGTRLTVKPNIQNPDPAVYQLRDSKSSDKSVCLFTDFDSQTNVSQSKDSDVYITDKTVLDMRSMDFKSNSAVAWSNKSDFACANAFNNSIIPEDTFFPSPESSCDVKLVEKSFETDTNLNFQNLSVIGFRILLLKVAGFNLLMTLRLWS

SEQ ID NO: 494 - protein, 310 aa, Homo sapiens
MGSRLLCWVLLCLLGAGPVKAGVTQTPRYLIKTRGQQVTLSCSPISGHRSVSWYQQTPGQGLQFLFEYFSETQRNKGNFPGRFSGRQFSNSRSEMNVSTLELGDSALYLCASSLQDTGELFFGEGSRLTVLEDLKNVFPPEVAVFEPSEAEISHTQKATLVCLATGFYPDHVELSWWVNGKEVHSGVSTDPQPLKEQPALNDSRYCLSSRLRVSATFWQNPRNHFRCQVQFYGLSENDEWTQDRAKPVTQIVSAEAWGRADCGFTSESYQQGVLSATILYEILLGKATLYAVLVSALVLMAMVKRKDSRG

SEQ ID NO: 495 - protein, 269 aa, Homo sapiens
MISLRVLLVILWLQLSWVWSQRKEVEQDPGPFNVPEGATVAFNCTYSNSASQSFFWYRQDCRKEPKLLMSVYSSGNEDGRFTAQLNRASQYISLLIRDSKLSDSATYLCVVNNEDDMRFGAGTRLTVKPNIQNPDPAVYQLRDSKSSDKSVCLFTDFDSQTNVSQSKDSDVYITDKTVLDMRSMDFKSNSAVAWSNKSDFACANAFNNSIIPEDTFFPSPESSCDVKLVEKSFETDTNLNFQNLSVIGFRILLLKVAGFNLLMTLRLWS

SEQ ID NO: 496 - protein, 313 aa, Homo sapiens
MGFRLLCCVAFCLLGAGPVDSGVTQTPKHLITATGQRVTLRCSPRSGDLSVYWYQQSLDQGLQFLIQYYNGEERAKGNILERFSAQQFPDLHSELNLSSLELGDSALYFCASSGGQAANTGELFFGEGSRLTVLEDLKNVFPPEVAVFEPSEAEISHTQKATLVCLATGFYPDHVELSWWVNGKEVHSGVSTDPQPLKEQPALNDSRYCLSSRLRVSATFWQNPRNHFRCQVQFYGLSENDEWTQDRAKPVTQIVSAEAWGRADCGFTSESYQQGVLSATILYEILLGKATLYAVLVSALVLMAMVKRKDSRG

SEQ ID NO: 497 - protein, 269 aa, Homo sapiens
MISLRVLLVILWLQLSWVWSQRKEVEQDPGPFNVPEGATVAFNCTYSNSASQSFFWYRQDCRKEPKLLMSVYSSGNEDGRFTAQLNRASQYISLLIRDSKLSDSATYLCVVNAKDDMRFGAGTRLTVKPNIQNPDPAVYQLRDSKSSDKSVCLFTDFDSQTNVSQSKDSDVYITDKTVLDMRSMDFKSNSAVAWSNKSDFACANAFNNSIIPEDTFFPSPESSCDVKLVEKSFETDTNLNFQNLSVIGFRILLLKVAGFNLLMTLRLWS

SEQ ID NO: 498 - protein, 311 aa, Homo sapiens
MGTSLLCWMALCLLGADHADTGVSQNPRHKITKRGQNVTFRCDPISEHNRLYWYRQTLGQGPEFLTYFQNEAQLEKSRLLSDRFSAERPKGSFSTLEIQRTEQGDSAMYLCAHGSANTGELFFGEGSRLTVLEDLKNVFPPEVAVFEPSEAEISHTQKATLVCLATGFYPDHVELSWWVNGKEVHSGVSTDPQPLKEQPALNDSRYCLSSRLRVSATFWQNPRNHFRCQVQFYGLSENDEWTQDRAKPVTQIVSAEAWGRADCGFTSESYQQGVLSATILYEILLGKATLYAVLVSALVLMAMVKRKDSRG

SEQ ID NO: 499 - protein, 269 aa, Homo sapiens
MISLRVLLVILWLQLSWVWSQRKEVEQDPGPFNVPEGATVAFNCTYSNSASQSFFWYRQDCRKEPKLLMSVYSSGNEDGRFTAQLNRASQYISLLIRDSKLSDSATYLCVVNARDDMRFGAGTRLTVKPNIQNPDPAVYQLRDSKSSDKSVCLFTDFDSQTNVSQSKDSDVYITDKTVLDMRSMDFKSNSAVAWSNKSDFACANAFNNSIIPEDTFFPSPESSCDVKLVEKSFETDTNLNFQNLSVIGFRILLLKVAGFNLLMTLRLWS

SEQ ID NO: 500 - protein, 311 aa, Homo sapiens
MGTRLLCWVVLGFLGTDHTGAGVSQSPRYKVAKRGQDVALRCDPISGHVSLFWYQQALGQGPEFLTYFQNEAQLDKSGLPSDRFFAERPEGSVSTLKIQRTQQEDSAVYLCASSRQNTGELFFGEGSRLTVLEDLKNVFPPEVAVFEPSEAEISHTQKATLVCLATGFYPDHVELSWWVNGKEVHSGVSTDPQPLKEQPALNDSRYCLSSRLRVSATFWQNPRNHFRCQVQFYGLSENDEWTQDRAKPVTQIVSAEAWGRADCGFTSESYQQGVLSATILYEILLGKATLYAVLVSALVLMAMVKRKDSRG

SEQ ID NO: 501 - protein, 269 aa, Homo sapiens
MISLRVLLVILWLQLSWVWSQRKEVEQDPGPFNVPEGATVAFNCTYSNSASQSFFWYRQDCRKEPKLLMSVYSSGNEDGRFTAQLNRASQYISLLIRDSKLSDSATYLCVVNELDDMRFGAGTRLTVKPNIQNPDPAVYQLRDSKSSDKSVCLFTDFDSQTNVSQSKDSDVYITDKTVLDMRSMDFKSNSAVAWSNKSDFACANAFNNSIIPEDTFFPSPESSCDVKLVEKSFETDTNLNFQNLSVIGFRILLLKVAGFNLLMTLRLWS

SEQ ID NO: 502 - protein, 310 aa, Homo sapiens
MGSRLLCWVLLCLLGAGPVKAGVTQTPRYLIKTRGQQVTLSCSPISGHRSVSWYQQTPGQGLQFLFEYFSETQRNKGNFPGRFSGRQFSNSRSEMNVSTLELGDSALYLCASRHQNTGELFFGEGSRLTVLEDLKNVFPPEVAVFEPSEAEISHTQKATLVCLATGFYPDHVELSWWVNGKEVHSGVSTDPQPLKEQPALNDSRYCLSSRLRVSATFWQNPRNHFRCQVQFYGLSENDEWTQDRAKPVTQIVSAEAWGRADCGFTSESYQQGVLSATILYEILLGKATLYAVLVSALVLMAMVKRKDSRG

SEQ ID NO: 503 - protein, 307 aa, Homo sapiens
MGTSLLCWMALCLLGADHADTGVSQNPRHKITKRGQNVTFRCDPISEHNRLYWYRQTLGQGPEFLTYFQNEAQLEKSRLLSDRFSAERPKGSFSTLEIQRTEQGDSAMYLCASSPDIEAFFGQGTRLTVVEDLNKVFPPEVAVFEPSEAEISHTQKATLVCLATGFFPDHVELSWWVNGKEVHSGVSTDPQPLKEQPALNDSRYCLSSRLRVSATFWQNPRNHFRCQVQFYGLSENDEWTQDRAKPVTQIVSAEAWGRADCGFTSVSYQQGVLSATILYEILLGKATLYAVLVSALVLMAMVKRKDF

SEQ ID NO: 504 - protein, 272 aa, Homo sapiens
MISLRVLLVILWLQLSWVWSQRKEVEQDPGPFNVPEGATVAFNCTYSNSASQSFFWYRQDCRKEPKLLMSVYSSGNEDGRFTAQLNRASQYISLLIRDSKLSDSATYLCVVNRPEAGTALIFGKGTTLSVSSNIQNPDPAVYQLRDSKSSDKSVCLFTDFDSQTNVSQSKDSDVYITDKTVLDMRSMDFKSNSAVAWSNKSDFACANAFNNSIIPEDTFFPSPESSCDVKLVEKSFETDTNLNFQNLSVIGFRILLLKVAGFNLLMTLRLWS

SEQ ID NO: 505 - protein, 322 aa, Homo sapiens
MLLLLLLLGPGISLLLPGSLAGSGLGAVVSQHPSWVICKSGTSVKIECRSLDFQATTMFWYRQFPKQSLMLMATSNEGSKATYEQGVEKDKFLINHASLTLSTLTVTSAHPEDSSFYICSARDYEQVNTGELFFGEGSRLTVLEDLKNVFPPEVAVFEPSEAEISHTQKATLVCLATGFYPDHVELSWWVNGKEVHSGVSTDPQPLKEQPALNDSRYCLSSRLRVSATFWQNPRNHFRCQVQFYGLSENDEWTQDRAKPVTQIVSAEAWGRADCGFTSESYQQGVLSATILYEILLGKATLYAVLVSALVLMAMVKRKDSRG

SEQ ID NO: 506 - protein, 272 aa, Homo sapiens
MISLRVLLVILWLQLSWVWSQRKEVEQDPGPFNVPEGATVAFNCTYSNSASQSFFWYRQDCRKEPKLLMSVYSSGNEDGRFTAQLNRASQYISLLIRDSKLSDSATYLCVVNRPTGNTPLVFGKGTRLSVIANIQNPDPAVYQLRDSKSSDKSVCLFTDFDSQTNVSQSKDSDVYITDKTVLDMRSMDFKSNSAVAWSNKSDFACANAFNNSIIPEDTFFPSPESSCDVKLVEKSFETDTNLNFQNLSVIGFRILLLKVAGFNLLMTLRLWS

SEQ ID NO: 507 - protein, 322 aa, Homo sapiens
MLLLLLLLGPGISLLLPGSLAGSGLGAVVSQHPSWVICKSGTSVKIECRSLDFQATTMFWYRQFPKQSLMLMATSNEGSKATYEQGVEKDKFLINHASLTLSTLTVTSAHPEDSSFYICSARTAQAVNTGELFFGEGSRLTVLEDLKNVFPPEVAVFEPSEAEISHTQKATLVCLATGFYPDHVELSWWVNGKEVHSGVSTDPQPLKEQPALNDSRYCLSSRLRVSATFWQNPRNHFRCQVQFYGLSENDEWTQDRAKPVTQIVSAEAWGRADCGFTSESYQQGVLSATILYEILLGKATLYAVLVSALVLMAMVKRKDSRG

SEQ ID NO: 508 - protein, 270 aa, Homo sapiens
MKSLRVLLVILWLQLSWVWSQQKEVEQNSGPLSVPEGAIASLNCTYSDRGSQSFFWYRQYSGKSPELIMFIYSNGDKEDGRFTAQLNKASQYVSLLIRDSQPSDSATYLCAVNGGDKIIFGKGTRLHILPNIQNPDPAVYQLRDSKSSDKSVCLFTDFDSQTNVSQSKDSDVYITDKTVLDMRSMDFKSNSAVAWSNKSDFACANAFNNSIIPEDTFFPSPESSCDVKLVEKSFETDTNLNFQNLSVIGFRILLLKVAGFNLLMTLRLWS

SEQ ID NO: 509 - protein, 309 aa, Homo sapiens
MGTSLLCWMALCLLGADHADTGVSQNPRHKITKRGQNVTFRCDPISEHNRLYWYRQTLGQGPEFLTYFQNEAQLEKSRLLSDRFSAERPKGSFSTLEIQRTEQGDSAMYLCASSSDIEQYFGPGTRLTVTEDLKNVFPPEVAVFEPSEAEISHTQKATLVCLATGFYPDHVELSWWVNGKEVHSGVSTDPQPLKEQPALNDSRYCLSSRLRVSATFWQNPRNHFRCQVQFYGLSENDEWTQDRAKPVTQIVSAEAWGRADCGFTSESYQQGVLSATILYEILLGKATLYAVLVSALVLMAMVKRKDSRG

SEQ ID NO: 510 - protein, 269 aa, Homo sapiens
MISLRVLLVILWLQLSWVWSQRKEVEQDPGPFNVPEGATVAFNCTYSNSASQSFFWYRQDCRKEPKLLMSVYSSGNEDGRFTAQLNRASQYISLLIRDSKLSDSATYLCVVNRDDKIIFGKGTRLHILPNIQNPDPAVYQLRDSKSSDKSVCLFTDFDSQTNVSQSKDSDVYITDKTVLDMRSMDFKSNSAVAWSNKSDFACANAFNNSIIPEDTFFPSPESSCDVKLVEKSFETDTNLNFQNLSVIGFRILLLKVAGFNLLMTLRLWS

SEQ ID NO: 511 - protein, 308 aa, Homo sapiens
MASLLFFCGAFYLLGTGSMDADVTQTPRNRITKTGKRIMLECSQTKGHDRMYWYRQDPGLGLRLIYYSFDVKDINKGEISDGYSVSRQAQAKFSLSLESAIPNQTALYFCATSDSNSLEAFFGQGTRLTVVEDLNKVFPPEVAVFEPSEAEISHTQKATLVCLATGFFPDHVELSWWVNGKEVHSGVSTDPQPLKEQPALNDSRYCLSSRLRVSATFWQNPRNHFRCQVQFYGLSENDEWTQDRAKPVTQIVSAEAWGRADCGFTSVSYQQGVLSATILYEILLGKATLYAVLVSALVLMAMVKRKDF

SEQ ID NO: 512 - protein, 270 aa, Homo sapiens
MISLRVLLVILWLQLSWVWSQRKEVEQDPGPFNVPEGATVAFNCTYSNSASQSFFWYRQDCRKEPKLLMSVYSSGNEDGRFTAQLNRASQYISLLIRDSKLSDSATYLCVVNRNDKLIFGTGTRLQVFPNIIQNPDPAVYQLRDSKSSDKSVCLFTDFDSQTNVSQSKDSDVYITDKTVLDMRSMDFKSNSAVAWSNKSDFACANAFNNSIIPEDTFFPSPESSCDVKLVEKSFETDTNLNFQNLSVIGFRILLLKVAGFNLLMTLRLWS

SEQ ID NO: 513 - protein, 311 aa, Homo sapiens
MGTSLLCWMALCLLGADHADTGVSQNPRHKITKRGQNVTFRCDPISEHNRLYWYRQTLGQGPEFLTYFQNEAQLEKSRLLSDRFSAERPKGSFSTLEIQRTEQGDSAMYLCADQEGNTGELFFGEGSRLTVLEDLKNVFPPEVAVFEPSEAEISHTQKATLVCLATGFYPDHVELSWWVNGKEVHSGVSTDPQPLKEQPALNDSRYCLSSRLRVSATFWQNPRNHFRCQVQFYGLSENDEWTQDRAKPVTQIVSAEAWGRADCGFTSESYQQGVLSATILYEILLGKATLYAVLVSALVLMAMVKRKDSRG

SEQ ID NO: 514 - protein, 270 aa, Homo sapiens
MISLRVLLVILWLQLSWVWSQRKEVEQDPGPFNVPEGATVAFNCTYSNSASQSFFWYRQDCRKEPKLLMSVYSSGNEDGRFTAQLNRASQYISLLIRDSKLSDSATYLCVVNGGDKLIFGTGTRLQVFPNIIQNPDPAVYQLRDSKSSDKSVCLFTDFDSQTNVSQSKDSDVYITDKTVLDMRSMDFKSNSAVAWSNKSDFACANAFNNSIIPEDTFFPSPESSCDVKLVEKSFETDTNLNFQNLSVIGFRILLLKVAGFNLLMTLRLWS

SEQ ID NO: 515 - protein, 272 aa, Homo sapiens
MISLRVLLVILWLQLSWVWSQRKEVEQDPGPFNVPEGATVAFNCTYSNSASQSFFWYRQDCRKEPKLLMSVYSSGNEDGRFTAQLNRASQYISLLIRDSKLSDSATYLCVVNDSWGKLQFEFGAGTQVVVTPDIQNPDPAVYQLRDSKSSDKSVCLFTDFDSQTNVSQSKDSDVYITDKTVLDMRSMDFKSNSAVAWSNKSDFACANAFNNSIIPEDTFFPSPESSCDVKLVEKSFETDTNLNFQNLSVIGFRILLLKVAGFNLLMTLRLWS

SEQ ID NO: 516 - protein, 311 aa, Homo sapiens
MGPQLLGYVVLCLLGAGPLEAQVTQNPRYLITVTGKKLTVTCSQNMNHEYMSWYRQDPGLGLRQIYYSMNVEVTDKGDVPEGYKVSRKEKRNFPLILESPSPNQTSLYFCASSFQGTSGSEYFGPGTRLTVTEDLKNVFPPEVAVFEPSEAEISHTQKATLVCLATGFYPDHVELSWWVNGKEVHSGVSTDPQPLKEQPALNDSRYCLSSRLRVSATFWQNPRNHFRCQVQFYGLSENDEWTQDRAKPVTQIVSAEAWGRADCGFTSESYQQGVLSATILYEILLGKATLYAVLVSALVLMAMVKRKDSRG

SEQ ID NO: 517 - protein, 307 aa, Homo sapiens
MGTSLLCWMALCLLGADHADTGVSQNPRHKITKRGQNVTFRCDPISEHNRLYWYRQTLGQGPEFLTYFQNEAQLEKSRLLSDRFSAERPKGSFSTLEIQRTEQGDSAMYLCASSPEIEAFFGQGTRLTVVEDLNKVFPPEVAVFEPSEAEISHTQKATLVCLATGFFPDHVELSWWVNGKEVHSGVSTDPQPLKEQPALNDSRYCLSSRLRVSATFWQNPRNHFRCQVQFYGLSENDEWTQDRAKPVTQIVSAEAWGRADCGFTSVSYQQGVLSATILYEILLGKATLYAVLVSALVLMAMVKRKDF

SEQ ID NO: 518 - protein, 269 aa, Homo sapiens
MISLRVLLVILWLQLSWVWSQRKEVEQDPGPFNVPEGATVAFNCTYSNSASQSFFWYRQDCRKEPKLLMSVYSSGNEDGRFTAQLNRASQYISLLIRDSKLSDSATYLCVVNRDNDMRFGAGTRLTVKPNIQNPDPAVYQLRDSKSSDKSVCLFTDFDSQTNVSQSKDSDVYITDKTVLDMRSMDFKSNSAVAWSNKSDFACANAFNNSIIPEDTFFPSPESSCDVKLVEKSFETDTNLNFQNLSVIGFRILLLKVAGFNLLMTLRLWS

SEQ ID NO: 519 - protein, 310 aa, Homo sapiens
MSNQVLCCVVLCFLGANTVDGGITQSPKYLFRKEGQNVTLSCEQNLNHDAMYWYRQDPGQGLRLIYYSQIVNDFQKGDIAEGYSVSREKKESFPLTVTSAQKNPTAFYLCASQDLDTGELFFGEGSRLTVLEDLKNVFPPEVAVFEPSEAEISHTQKATLVCLATGFYPDHVELSWWVNGKEVHSGVSTDPQPLKEQPALNDSRYCLSSRLRVSATFWQNPRNHFRCQVQFYGLSENDEWTQDRAKPVTQIVSAEAWGRADCGFTSESYQQGVLSATILYEILLGKATLYAVLVSALVLMAMVKRKDSRG

SEQ ID NO: 520 - protein, 269 aa, Homo sapiens
MISLRVLLVILWLQLSWVWSQRKEVEQDPGPFNVPEGATVAFNCTYSNSASQSFFWYRQDCRKEPKLLMSVYSSGNEDGRFTAQLNRASQYISLLIRDSKLSDSATYLCVVNKYDDMRFGAGTRLTVKPNIQNPDPAVYQLRDSKSSDKSVCLFTDFDSQTNVSQSKDSDVYITDKTVLDMRSMDFKSNSAVAWSNKSDFACANAFNNSIIPEDTFFPSPESSCDVKLVEKSFETDTNLNFQNLSVIGFRILLLKVAGFNLLMTLRLWS

SEQ ID NO: 521 - protein, 308 aa, Homo sapiens
MLCSLLALLLGTFFGVRSQTIHQWPATLVQPVGSPLSLECTVEGTSNPNLYWYRQAAGRGLQLLFYSVGIGQISSEVPQNLSASRPQDRQFILSSKKLLLSDSGFYLCAHFDRNTGELFFGEGSRLTVLEDLKNVFPPEVAVFEPSEAEISHTQKATLVCLATGFYPDHVELSWWVNGKEVHSGVSTDPQPLKEQPALNDSRYCLSSRLRVSATFWQNPRNHFRCQVQFYGLSENDEWTQDRAKPVTQIVSAEAWGRADCGFTSESYQQGVLSATILYEILLGKATLYAVLVSALVLMAMVKRKDSRG

SEQ ID NO: 522 - protein, 272 aa, Homo sapiens
MISLRVLLVILWLQLSWVWSQRKEVEQDPGPFNVPEGATVAFNCTYSNSASQSFFWYRQDCRKEPKLLMSVYSSGNEDGRFTAQLNRASQYISLLIRDSKLSDSATYLCVVNIPSGNTPLVFGKGTRLSVIANIQNPDPAVYQLRDSKSSDKSVCLFTDFDSQTNVSQSKDSDVYITDKTVLDMRSMDFKSNSAVAWSNKSDFACANAFNNSIIPEDTFFPSPESSCDVKLVEKSFETDTNLNFQNLSVIGFRILLLKVAGFNLLMTLRLWS

SEQ ID NO: 523 - protein, 322 aa, Homo sapiens
MLLLLLLLGPGISLLLPGSLAGSGLGAVVSQHPSWVICKSGTSVKIECRSLDFQATTMFWYRQFPKQSLMLMATSNEGSKATYEQGVEKDKFLINHASLTLSTLTVTSAHPEDSSFYICSARDEQGMNTGELFFGEGSRLTVLEDLKNVFPPEVAVFEPSEAEISHTQKATLVCLATGFYPDHVELSWWVNGKEVHSGVSTDPQPLKEQPALNDSRYCLSSRLRVSATFWQNPRNHFRCQVQFYGLSENDEWTQDRAKPVTQIVSAEAWGRADCGFTSESYQQGVLSATILYEILLGKATLYAVLVSALVLMAMVKRKDSRG

SEQ ID NO: 524 - protein, 269 aa, Homo sapiens
MISLRVLLVILWLQLSWVWSQRKEVEQDPGPFNVPEGATVAFNCTYSNSASQSFFWYRQDCRKEPKLLMSVYSSGNEDGRFTAQLNRASQYISLLIRDSKLSDSATYLCVVNRYNDMRFGAGTRLTVKPNIQNPDPAVYQLRDSKSSDKSVCLFTDFDSQTNVSQSKDSDVYITDKTVLDMRSMDFKSNSAVAWSNKSDFACANAFNNSIIPEDTFFPSPESSCDVKLVEKSFETDTNLNFQNLSVIGFRILLLKVAGFNLLMTLRLWS

SEQ ID NO: 525 - protein, 319 aa, Homo sapiens
MLLLLLLLGPGISLLLPGSLAGSGLGAVVSQHPSWVICKSGTSVKIECRSLDFQATTMFWYRQFPKQSLMLMATSNEGSKATYEQGVEKDKFLINHASLTLSTLTVTSAHPEDSSFYICSAGELNTGELFFGEGSRLTVLEDLKNVFPPEVAVFEPSEAEISHTQKATLVCLATGFYPDHVELSWWVNGKEVHSGVSTDPQPLKEQPALNDSRYCLSSRLRVSATFWQNPRNHFRCQVQFYGLSENDEWTQDRAKPVTQIVSAEAWGRADCGFTSESYQQGVLSATILYEILLGKATLYAVLVSALVLMAMVKRKDSRG

SEQ ID NO: 526 - protein, 270 aa, Homo sapiens
MISLRVLLVILWLQLSWVWSQRKEVEQDPGPFNVPEGATVAFNCTYSNSASQSFFWYRQDCRKEPKLLMSVYSSGNEDGRFTAQLNRASQYISLLIRDSKLSDSATYLCVVNAGDKLIFGTGTRLQVFPNIIQNPDPAVYQLRDSKSSDKSVCLFTDFDSQTNVSQSKDSDVYITDKTVLDMRSMDFKSNSAVAWSNKSDFACANAFNNSIIPEDTFFPSPESSCDVKLVEKSFETDTNLNFQNLSVIGFRILLLKVAGFNLLMTLRLWS

SEQ ID NO: 527 - protein, 307 aa, Homo sapiens
MGTSLLCWMALCLLGADHADTGVSQNPRHKITKRGQNVTFRCDPISEHNRLYWYRQTLGQGPEFLTYFQNEAQLEKSRLLSDRFSAERPKGSFSTLEIQRTEQGDSAMYLCASSLDIQAFFGQGTRLTVVEDLNKVFPPEVAVFEPSEAEISHTQKATLVCLATGFFPDHVELSWWVNGKEVHSGVSTDPQPLKEQPALNDSRYCLSSRLRVSATFWQNPRNHFRCQVQFYGLSENDEWTQDRAKPVTQIVSAEAWGRADCGFTSVSYQQGVLSATILYEILLGKATLYAVLVSALVLMAMVKRKDF

SEQ ID NO: 528 - protein, 268 aa, Homo sapiens
MALQSTLGAVWLGLLLNSLWKVAESKDQVFQPSTVASSEGAVVEIFCNHSVSNAYNFFWYLHFPGCAPRLLVKGSKPSQQGRYNMTYERFSSSLLILQVREADAAVYYCVELNARLMFGDGTQLVVKPNIQNPDPAVYQLRDSKSSDKSVCLFTDFDSQTNVSQSKDSDVYITDKTVLDMRSMDFKSNSAVAWSNKSDFACANAFNNSIIPEDTFFPSPESSCDVKLVEKSFETDTNLNFQNLSVIGFRILLLKVAGFNLLMTLRLWS

SEQ ID NO: 529 - protein, 311 aa, Homo sapiens
MGTSLLCWMALCLLGADHADTGVSQNPRHKITKRGQNVTFRCDPISEHNRLYWYRQTLGQGPEFLTYFQNEAQLEKSRLLSDRFSAERPKGSFSTLEIQRTEQGDSAMYLCAHGQANTGELFFGEGSRLTVLEDLKNVFPPEVAVFEPSEAEISHTQKATLVCLATGFYPDHVELSWWVNGKEVHSGVSTDPQPLKEQPALNDSRYCLSSRLRVSATFWQNPRNHFRCQVQFYGLSENDEWTQDRAKPVTQIVSAEAWGRADCGFTSESYQQGVLSATILYEILLGKATLYAVLVSALVLMAMVKRKDSRG

SEQ ID NO: 530 - protein, 9 aa, Severe acute respiratory syndrome coronavirus 2
FTSDYYQLY

SEQ ID NO: 531 - protein, 270 aa, Homo sapiens
MKRILGALLGLLSAQVCCVRGIQVEQSPPDLILQEGANSTLRCNFSDSVNNLQWFHQNPWGQLINLFYIPSGTKQNGRLSATTVATERYSLLYISSSQTTDSGVYFCAVDGEGGSEKLVFGKGTKLTVNPYIQNPDPAVYQLRDSKSSDKSVCLFTDFDSQTNVSQSKDSDVYITDKTVLDMRSMDFKSNSAVAWSNKSDFACANAFNNSIIPEDTFFPSPESSCDVKLVEKSFETDTNLNFQNLSVIGFRILLLKVAGFNLLMTLRLWS

SEQ ID NO: 532 - protein, 310 aa, Homo sapiens
MGSRLLCWVLLCLLGAGPVKAGVTQTPRYLIKTRGQQVTLSCSPISGHRSVSWYQQTPGQGLQFLFEYFSETQRNKGNFPGRFSGRQFSNSRSEMNVSTLELGDSALYLCASSQWTGVGQPQHFGDGTRLSILEDLNKVFPPEVAVFEPSEAEISHTQKATLVCLATGFFPDHVELSWWVNGKEVHSGVSTDPQPLKEQPALNDSRYCLSSRLRVSATFWQNPRNHFRCQVQFYGLSENDEWTQDRAKPVTQIVSAEAWGRADCGFTSVSYQQGVLSATILYEILLGKATLYAVLVSALVLMAMVKRKDF

SEQ ID NO: 533 - protein, 272 aa, Homo sapiens
MRLVARVTVFLTFGTIIDAKTTQPPSMDCAEGRAANLPCNHSTISGNEYVYWYRQIHSQGPQYIIHGLKNNETNEMASLIITEDRKSSTLILPHATLRDTAVYYCIVRAPEFLNTGFQKLVFGTGTRLLVSPNIQNPDPAVYQLRDSKSSDKSVCLFTDFDSQTNVSQSKDSDVYITDKTVLDMRSMDFKSNSAVAWSNKSDFACANAFNNSIIPEDTFFPSPESSCDVKLVEKSFETDTNLNFQNLSVIGFRILLLKVAGFNLLMTLRLWS

SEQ ID NO: 534 - protein, 315 aa, Homo sapiens
MSIGLLCCAALSLLWAGPVNAGVTQTPKFQVLKTGQSMTLQCAQDMNHEYMSWYRQDPGMGLRLIHYSVGAGITDQGEVPNGYNVSRSTTEDFPLRLLSAAPSQTSVYFCASSPRLGVAQNTGELFFGEGSRLTVLEDLKNVFPPEVAVFEPSEAEISHTQKATLVCLATGFYPDHVELSWWVNGKEVHSGVSTDPQPLKEQPALNDSRYCLSSRLRVSATFWQNPRNHFRCQVQFYGLSENDEWTQDRAKPVTQIVSAEAWGRADCGFTSESYQQGVLSATILYEILLGKATLYAVLVSALVLMAMVKRKDSRG

SEQ ID NO: 535 - protein, 266 aa, Homo sapiens
MLLITSMLVLWMQLSQVNGQQVMQIPQYQHVQEGEDFTTYCNSSTTLSNIQWYKQRPGGHPVFLIQLVKSGEVKKQKRLTFQFGEAKKNSSLHITATQTTDVGTYFCTRAGNMLTFGGGTRLMVKPHIQNPDPAVYQLRDSKSSDKSVCLFTDFDSQTNVSQSKDSDVYITDKTVLDMRSMDFKSNSAVAWSNKSDFACANAFNNSIIPEDTFFPSPESSCDVKLVEKSFETDTNLNFQNLSVIGFRILLLKVAGFNLLMTLRLWS

SEQ ID NO: 536 - protein, 269 aa, Homo sapiens
MKKLLAMILWLQLDRLSGELKVEQNPLFLSMQEGKNYTIYCNYSTTSDRLYWYRQDPGKSLESLFVLLSNGAVKQEGRLMASLDTKARLSTLHITAAVHDLSATYFCASFSGTYKYIFGTGTRLKVLANIIQNPDPAVYQLRDSKSSDKSVCLFTDFDSQTNVSQSKDSDVYITDKTVLDMRSMDFKSNSAVAWSNKSDFACANAFNNSIIPEDTFFPSPESSCDVKLVEKSFETDTNLNFQNLSVIGFRILLLKVAGFNLLMTLRLWS

SEQ ID NO: 537 - protein, 315 aa, Homo sapiens
MSIGLLCCAALSLLWAGPVNAGVTQTPKFQVLKTGQSMTLQCAQDMNHEYMSWYRQDPGMGLRLIHYSVGAGITDQGEVPNGYNVSRSTTEDFPLRLLSAAPSQTSVYFCASSSGTSLSRFPYEQYFGPGTRLTVTEDLKNVFPPEVAVFEPSEAEISHTQKATLVCLATGFYPDHVELSWWVNGKEVHSGVSTDPQPLKEQPALNDSRYCLSSRLRVSATFWQNPRNHFRCQVQFYGLSENDEWTQDRAKPVTQIVSAEAWGRADCGFTSESYQQGVLSATILYEILLGKATLYAVLVSALVLMAMVKRKDSRG

SEQ ID NO: 538 - protein, 270 aa, Homo sapiens
METLLGLLILWLQLQWVSSKQEVTQIPAALSVPEGENLVLNCSFTDSAIYNLQWFRQDPGKGLTSLLLIQSSQREQTSGRLNASLDKSSGRSTLYIAASQPGDSATYLCAVKNYGQNFVFGPGTRLSVLPYIQNPDPAVYQLRDSKSSDKSVCLFTDFDSQTNVSQSKDSDVYITDKTVLDMRSMDFKSNSAVAWSNKSDFACANAFNNSIIPEDTFFPSPESSCDVKLVEKSFETDTNLNFQNLSVIGFRILLLKVAGFNLLMTLRLWS

SEQ ID NO: 539 - protein, 270 aa, Homo sapiens
MLLEHLLIILWMQLTWVSGQQLNQSPQSMFIQEGEDVSMNCTSSSIFNTWLWYKQEPGEGPVLLIALYKAGELTSNGRLTAQFGITRKDSFLNISASIPSDVGIYFCAGSSDGSARQLTFGSGTQLTVLPDIQNPDPAVYQLRDSKSSDKSVCLFTDFDSQTNVSQSKDSDVYITDKTVLDMRSMDFKSNSAVAWSNKSDFACANAFNNSIIPEDTFFPSPESSCDVKLVEKSFETDTNLNFQNLSVIGFRILLLKVAGFNLLMTLRLWS

SEQ ID NO: 540 - protein, 310 aa, Homo sapiens
MGSRLLCWVLLCLLGAGPVKAGVTQTPRYLIKTRGQQVTLSCSPISGHRSVSWYQQTPGQGLQFLFEYFSETQRNKGNFPGRFSGRQFSNSRSEMNVSTLELGDSALYLCASSAWTGSGNTIYFGEGSWLTVVEDLNKVFPPEVAVFEPSEAEISHTQKATLVCLATGFFPDHVELSWWVNGKEVHSGVSTDPQPLKEQPALNDSRYCLSSRLRVSATFWQNPRNHFRCQVQFYGLSENDEWTQDRAKPVTQIVSAEAWGRADCGFTSVSYQQGVLSATILYEILLGKATLYAVLVSALVLMAMVKRKDF

SEQ ID NO: 541 - protein, 277 aa, Homo sapiens
MAMLLGASVLILWLQPDWVNSQQKNDDQQVKQNSPSLSVQEGRISILNCDYTNSMFDYFLWYKKYPAEGPTFLISISSIKDKNEDGRFTVFLNKSAKHLSLHIVPSQPGDSAVYFCAASWGKLQFEFGAGTQVVVTPDIQNPDPAVYQLRDSKSSDKSVCLFTDFDSQTNVSQSKDSDVYITDKTVLDMRSMDFKSNSAVAWSNKSDFACANAFNNSIIPEDTFFPSPESSCDVKLVEKSFETDTNLNFQNLSVIGFRILLLKVAGFNLLMTLRLWS

SEQ ID NO: 542 - protein, 311 aa, Homo sapiens
MGTRLLFWVAFCLLGADHTGAGVSQSPSNKVTEKGKDVELRCDPISGHTALYWYRQSLGQGLEFLIYFQGNSAPDKSGLPSDRFSAERTGGSVSTLTIQRTQQEDSAVYLCASSLEGQGSGGYTFGSGTRLTVVEDLNKVFPPEVAVFEPSEAEISHTQKATLVCLATGFFPDHVELSWWVNGKEVHSGVSTDPQPLKEQPALNDSRYCLSSRLRVSATFWQNPRNHFRCQVQFYGLSENDEWTQDRAKPVTQIVSAEAWGRADCGFTSVSYQQGVLSATILYEILLGKATLYAVLVSALVLMAMVKRKDF

SEQ ID NO: 543 - protein, 277 aa, Homo sapiens
MAMLLGASVLILWLQPDWVNSQQKNDDQQVKQNSPSLSVQEGRISILNCDYTNSMFDYFLWYKKYPAEGPTFLISISSIKDKNEDGRFTVFLNKSAKHLSLHIVPSQPGDSAVYFCAVSWGKLQFEFGAGTQVVVTPDIQNPDPAVYQLRDSKSSDKSVCLFTDFDSQTNVSQSKDSDVYITDKTVLDMRSMDFKSNSAVAWSNKSDFACANAFNNSIIPEDTFFPSPESSCDVKLVEKSFETDTNLNFQNLSVIGFRILLLKVAGFNLLMTLRLWS

SEQ ID NO: 544 - protein, 311 aa, Homo sapiens
MGTRLLFWVAFCLLGADHTGAGVSQSPSNKVTEKGKDVELRCDPISGHTALYWYRQSLGQGLEFLIYFQGNSAPDKSGLPSDRFSAERTGGSVSTLTIQRTQQEDSAVYLCASSSEGQGAGGYTFGSGTRLTVVEDLNKVFPPEVAVFEPSEAEISHTQKATLVCLATGFFPDHVELSWWVNGKEVHSGVSTDPQPLKEQPALNDSRYCLSSRLRVSATFWQNPRNHFRCQVQFYGLSENDEWTQDRAKPVTQIVSAEAWGRADCGFTSVSYQQGVLSATILYEILLGKATLYAVLVSALVLMAMVKRKDF

SEQ ID NO: 545 - protein, 270 aa, Homo sapiens
METLLGLLILWLQLQWVSSKQEVTQIPAALSVPEGENLVLNCSFTDSAIYNLQWFRQDPGKGLTSLLLIQSSQREQTSGRLNASLDKSSGRSTLYIAASQPGDSATYLCAVKLTGNQFYFGTGTSLTVIPNIQNPDPAVYQLRDSKSSDKSVCLFTDFDSQTNVSQSKDSDVYITDKTVLDMRSMDFKSNSAVAWSNKSDFACANAFNNSIIPEDTFFPSPESSCDVKLVEKSFETDTNLNFQNLSVIGFRILLLKVAGFNLLMTLRLWS

SEQ ID NO: 546 - protein, 315 aa, Homo sapiens
MSIGLLCCAALSLLWAGPVNAGVTQTPKFQVLKTGQSMTLQCAQDMNHEYMSWYRQDPGMGLRLIHYSVGAGITDQGEVPNGYNVSRSTTEDFPLRLLSAAPSQTSVYFCASSYSSTRGRRPYEQYFGPGTRLTVTEDLKNVFPPEVAVFEPSEAEISHTQKATLVCLATGFYPDHVELSWWVNGKEVHSGVSTDPQPLKEQPALNDSRYCLSSRLRVSATFWQNPRNHFRCQVQFYGLSENDEWTQDRAKPVTQIVSAEAWGRADCGFTSESYQQGVLSATILYEILLGKATLYAVLVSALVLMAMVKRKDSRG

SEQ ID NO: 547 - protein, 276 aa, Homo sapiens
MISLRVLLVILWLQLSWVWSQRKEVEQDPGPFNVPEGATVAFNCTYSNSASQSFFWYRQDCRKEPKLLMSVYSSGNEDGRFTAQLNRASQYISLLIRDSKLSDSATYLCVVISPLNYGGSQGNLIFGKGTKLSVKPNIQNPDPAVYQLRDSKSSDKSVCLFTDFDSQTNVSQSKDSDVYITDKTVLDMRSMDFKSNSAVAWSNKSDFACANAFNNSIIPEDTFFPSPESSCDVKLVEKSFETDTNLNFQNLSVIGFRILLLKVAGFNLLMTLRLWS

SEQ ID NO: 548 - protein, 312 aa, Homo sapiens
MGIRLLCRVAFCFLAVGLVDVKVTQSSRYLVKRTGEKVFLECVQDMDHENMFWYRQDPGLGLRLIYFSYDVKMKEKGDIPEGYSVSREKKERFSLILESASTNQTSMYLCASSPPVGGSYEQYFGPGTRLTVTEDLKNVFPPEVAVFEPSEAEISHTQKATLVCLATGFYPDHVELSWWVNGKEVHSGVSTDPQPLKEQPALNDSRYCLSSRLRVSATFWQNPRNHFRCQVQFYGLSENDEWTQDRAKPVTQIVSAEAWGRADCGFTSESYQQGVLSATILYEILLGKATLYAVLVSALVLMAMVKRKDSRG

SEQ ID NO: 549 - protein, 271 aa, Homo sapiens
MLLEHLLIILWMQLTWVSGQQLNQSPQSMFIQEGEDVSMNCTSSSIFNTWLWYKQEPGEGPVLLIALYKAGELTSNGRLTAQFGITRKDSFLNISASIPSDVGIYFCAGQSDGGSQGNLIFGKGTKLSVKPNIQNPDPAVYQLRDSKSSDKSVCLFTDFDSQTNVSQSKDSDVYITDKTVLDMRSMDFKSNSAVAWSNKSDFACANAFNNSIIPEDTFFPSPESSCDVKLVEKSFETDTNLNFQNLSVIGFRILLLKVAGFNLLMTLRLWS

SEQ ID NO: 550 - protein, 312 aa, Homo sapiens
MGSRLLCWVLLCLLGAGPVKAGVTQTPRYLIKTRGQQVTLSCSPISGHRSVSWYQQTPGQGLQFLFEYFSETQRNKGNFPGRFSGRQFSNSRSEMNVSTLELGDSALYLCASSPWTGVGREQFFGPGTRLTVLEDLKNVFPPEVAVFEPSEAEISHTQKATLVCLATGFYPDHVELSWWVNGKEVHSGVSTDPQPLKEQPALNDSRYCLSSRLRVSATFWQNPRNHFRCQVQFYGLSENDEWTQDRAKPVTQIVSAEAWGRADCGFTSESYQQGVLSATILYEILLGKATLYAVLVSALVLMAMVKRKDSRG

SEQ ID NO: 551 - protein, 272 aa, Homo sapiens
MLLLLVPVLEVIFTLGGTRAQSVTQLDSHVSVSEGTPVLLRCNYSSSYSPSLFWYVQHPNKGLQLLLKYTSAATLVKGINGFEAEFKKSETSFHLTKPSAHMSDAAEYFCVVTWGNNNDMRFGAGTRLTVKPNIQNPDPAVYQLRDSKSSDKSVCLFTDFDSQTNVSQSKDSDVYITDKTVLDMRSMDFKSNSAVAWSNKSDFACANAFNNSIIPEDTFFPSPESSCDVKLVEKSFETDTNLNFQNLSVIGFRILLLKVAGFNLLMTLRLWS

SEQ ID NO: 552 - protein, 309 aa, Homo sapiens
MGPGLLHWMALCLLGTGHGDAMVIQNPRYQVTQFGKPVTLSCSQTLNHNVMYWYQQKSSQAPKLLFHYYDKDFNNEADTPDNFQSRRPNTSFCFLDIRSPGLGDTAMYLCATSRDWDTQYFGPGTRLTVLEDLKNVFPPEVAVFEPSEAEISHTQKATLVCLATGFYPDHVELSWWVNGKEVHSGVSTDPQPLKEQPALNDSRYCLSSRLRVSATFWQNPRNHFRCQVQFYGLSENDEWTQDRAKPVTQIVSAEAWGRADCGFTSESYQQGVLSATILYEILLGKATLYAVLVSALVLMAMVKRKDSRG

SEQ ID NO: 553 - protein, 276 aa, Homo sapiens
MLTASLLRAVIASICVVSSMAQKVTQAQTEISVVEKEDVTLDCVYETRDTTYYLFWYKQPPSGELVFLIRRNSFDEQNEISGRYSWNFQKSTSSFNFTITASQVVDSAVYFCALSAVSGSARQLTFGSGTQLTVLPDIQNPDPAVYQLRDSKSSDKSVCLFTDFDSQTNVSQSKDSDVYITDKTVLDMRSMDFKSNSAVAWSNKSDFACANAFNNSIIPEDTFFPSPESSCDVKLVEKSFETDTNLNFQNLSVIGFRILLLKVAGFNLLMTLRLWS

SEQ ID NO: 554 - protein, 314 aa, Homo sapiens
MGPQLLGYVVLCLLGAGPLEAQVTQNPRYLITVTGKKLTVTCSQNMNHEYMSWYRQDPGLGLRQIYYSMNVEVTDKGDVPEGYKVSRKEKRNFPLILESPSPNQTSLYFCASSVTSEGSIGNEQFFGPGTRLTVLEDLKNVFPPEVAVFEPSEAEISHTQKATLVCLATGFYPDHVELSWWVNGKEVHSGVSTDPQPLKEQPALNDSRYCLSSRLRVSATFWQNPRNHFRCQVQFYGLSENDEWTQDRAKPVTQIVSAEAWGRADCGFTSESYQQGVLSATILYEILLGKATLYAVLVSALVLMAMVKRKDSRG

SEQ ID NO: 555 - protein, 273 aa, Homo sapiens
MNYSPGLVSLILLLLGRTRGNSVTQMEGPVTLSEEAFLTINCTYTATGYPSLFWYVQYPGEGLQLLLKATKADDKGSNKGFEATYRKETTSFHLEKGSVQVSDSAVYFCALTTYGGATNKLIFGTGTLLAVQPNIQNPDPAVYQLRDSKSSDKSVCLFTDFDSQTNVSQSKDSDVYITDKTVLDMRSMDFKSNSAVAWSNKSDFACANAFNNSIIPEDTFFPSPESSCDVKLVEKSFETDTNLNFQNLSVIGFRILLLKVAGFNLLMTLRLWS

SEQ ID NO: 556 - protein, 317 aa, Homo sapiens
MGTSLLCWVVLGFLGTDHTGAGVSQSPRYKVTKRGQDVALRCDPISGHVSLYWYRQALGQGPEFLTYFNYEAQQDKSGLPNDRFSAERPEGSISTLTIQRTEQRDSAMYRCASSLGGTSGGPNPYEQYFGPGTRLTVTEDLKNVFPPEVAVFEPSEAEISHTQKATLVCLATGFYPDHVELSWWVNGKEVHSGVSTDPQPLKEQPALNDSRYCLSSRLRVSATFWQNPRNHFRCQVQFYGLSENDEWTQDRAKPVTQIVSAEAWGRADCGFTSESYQQGVLSATILYEILLGKATLYAVLVSALVLMAMVKRKDSRG

SEQ ID NO: 557 - protein, 271 aa, Homo sapiens
MISLRVLLVILWLQLSWVWSQRKEVEQDPGPFNVPEGATVAFNCTYSNSASQSFFWYRQDCRKEPKLLMSVYSSGNEDGRFTAQLNRASQYISLLIRDSKLSDSATYLCVVKEERANNLFFGTGTRLTVIPYIQNPDPAVYQLRDSKSSDKSVCLFTDFDSQTNVSQSKDSDVYITDKTVLDMRSMDFKSNSAVAWSNKSDFACANAFNNSIIPEDTFFPSPESSCDVKLVEKSFETDTNLNFQNLSVIGFRILLLKVAGFNLLMTLRLWS

SEQ ID NO: 558 - protein, 307 aa, Homo sapiens
MLSLLLLLLGLGSVFSAVISQKPSRDICQRGTSLTIQCQVDSQVTMMFWYRQQPGQSLTLIATANQGSEATYESGFVIDKFPISRPNLTFSTLTVSNMSPEDSSIYLCSVRTARTNTEAFFGQGTRLTVVEDLNKVFPPEVAVFEPSEAEISHTQKATLVCLATGFFPDHVELSWWVNGKEVHSGVSTDPQPLKEQPALNDSRYCLSSRLRVSATFWQNPRNHFRCQVQFYGLSENDEWTQDRAKPVTQIVSAEAWGRADCGFTSVSYQQGVLSATILYEILLGKATLYAVLVSALVLMAMVKRKDF

SEQ ID NO: 559 - protein, 279 aa, Homo sapiens
MEKMLECAFIVLWLQLGWLSGEDQVTQSPEALRLQEGESSSLNCSYTVSGLRGLFWYRQDPGKGPEFLFTLYSAGEEKEKERLKATLTKKESFLHITAPKPEDSATYLCAVQAEGFGNVLHCFGNVLHCGSGTQVIVLPHIQNPDPAVYQLRDSKSSDKSVCLFTDFDSQTNVSQSKDSDVYITDKTVLDMRSMDFKSNSAVAWSNKSDFACANAFNNSIIPEDTFFPSPESSCDVKLVEKSFETDTNLNFQNLSVIGFRILLLKVAGFNLLMTLRLWS

SEQ ID NO: 560 - protein, 311 aa, Homo sapiens
MDTWLVCWAIFSLLKAGLTEPEVTQTPSHQVTQMGQEVILRCVPISNHLYFYWYRQILGQKVEFLVSFYNNEISEKSEIFDDQFSVERPDGSNFTLKIRSTKLEDSAMYFCASTDLNTGELFFGEGSRLTVLEDLKNVFPPEVAVFEPSEAEISHTQKATLVCLATGFYPDHVELSWWVNGKEVHSGVSTDPQPLKEQPALNDSRYCLSSRLRVSATFWQNPRNHFRCQVQFYGLSENDEWTQDRAKPVTQIVSAEAWGRADCGFTSESYQQGVLSATILYEILLGKATLYAVLVSALVLMAMVKRKDSRG

SEQ ID NO: 561 - protein, 267 aa, Homo sapiens
MRQVARVIVFLTLSTLSLAKTTQPISMDSYEGQEVNITCSHNNIATNDYITWYQQFPSQGPRFIIQGYKTKVTNEVASLFIPADRKSSTLSLPRVSLSDTAVYYCLEARAAGNKLTFGGGTRVLVKPNIQNPDPAVYQLRDSKSSDKSVCLFTDFDSQTNVSQSKDSDVYITDKTVLDMRSMDFKSNSAVAWSNKSDFACANAFNNSIIPEDTFFPSPESSCDVKLVEKSFETDTNLNFQNLSVIGFRILLLKVAGFNLLMTLRLWS

SEQ ID NO: 562 - protein, 314 aa, Homo sapiens
MGCRLLCCAVLCLLGAVPIDTEVTQTPKHLVMGMTNKKSLKCEQHMGHRAMYWYKQKAKKPPELMFVYSYEKLSINESVPSRFSPECPNSSLLNLHLHALQPEDSALYLCASSPYGGGGLADTQYFGPGTRLTVLEDLKNVFPPEVAVFEPSEAEISHTQKATLVCLATGFYPDHVELSWWVNGKEVHSGVSTDPQPLKEQPALNDSRYCLSSRLRVSATFWQNPRNHFRCQVQFYGLSENDEWTQDRAKPVTQIVSAEAWGRADCGFTSESYQQGVLSATILYEILLGKATLYAVLVSALVLMAMVKRKDSRG

SEQ ID NO: 563 - protein, 270 aa, Homo sapiens
MLLITSMLVLWMQLSQVNGQQVMQIPQYQHVQEGEDFTTYCNSSTTLSNIQWYKQRPGGHPVFLIQLVKSGEVKKQKRLTFQFGEAKKNSSLHITATQTTDVGTYFCAGQWEGSNYKLTFGKGTLLTVNPNIQNPDPAVYQLRDSKSSDKSVCLFTDFDSQTNVSQSKDSDVYITDKTVLDMRSMDFKSNSAVAWSNKSDFACANAFNNSIIPEDTFFPSPESSCDVKLVEKSFETDTNLNFQNLSVIGFRILLLKVAGFNLLMTLRLWS

SEQ ID NO: 564 - protein, 310 aa, Homo sapiens
MGCRLLCCAVLCLLGAVPMETGVTQTPRHLVMGMTNKKSLKCEQHLGHNAMYWYKQSAKKPLELMFVYNFKEQTENNSVPSRFSPECPNSSHLFLHLHTLQPEDSALYLCASSQAQGTGTEAFFGQGTRLTVVEDLNKVFPPEVAVFEPSEAEISHTQKATLVCLATGFFPDHVELSWWVNGKEVHSGVSTDPQPLKEQPALNDSRYCLSSRLRVSATFWQNPRNHFRCQVQFYGLSENDEWTQDRAKPVTQIVSAEAWGRADCGFTSVSYQQGVLSATILYEILLGKATLYAVLVSALVLMAMVKRKDF

SEQ ID NO: 565 - protein, 270 aa, Homo sapiens
METLLGLLILWLQLQWVSSKQEVTQIPAALSVPEGENLVLNCSFTDSAIYNLQWFRQDPGKGLTSLLLIQSSQREQTSGRLNASLDKSSGRSTLYIAASQPGDSATYLCAVRPVGNQFYFGTGTSLTVIPNIQNPDPAVYQLRDSKSSDKSVCLFTDFDSQTNVSQSKDSDVYITDKTVLDMRSMDFKSNSAVAWSNKSDFACANAFNNSIIPEDTFFPSPESSCDVKLVEKSFETDTNLNFQNLSVIGFRILLLKVAGFNLLMTLRLWS

SEQ ID NO: 566 - protein, 307 aa, Homo sapiens
MLSLLLLLLGLGSVFSAVISQKPSRDICQRGTSLTIQCQVDSQVTMMFWYRQQPGQSLTLIATANQGSEATYESGFVIDKFPISRPNLTFSTLTVSNMSPEDSSIYLCSVQDSSYNQPQHFGDGTRLSILEDLNKVFPPEVAVFEPSEAEISHTQKATLVCLATGFFPDHVELSWWVNGKEVHSGVSTDPQPLKEQPALNDSRYCLSSRLRVSATFWQNPRNHFRCQVQFYGLSENDEWTQDRAKPVTQIVSAEAWGRADCGFTSVSYQQGVLSATILYEILLGKATLYAVLVSALVLMAMVKRKDF

SEQ ID NO: 567 - protein, 271 aa, Homo sapiens
MLLEHLLIILWMQLTWVSGQQLNQSPQSMFIQEGEDVSMNCTSSSIFNTWLWYKQEPGEGPVLLIALYKAGELTSNGRLTAQFGITRKDSFLNISASIPSDVGIYFCAGQGDGGSQGNLIFGKGTKLSVKPNIQNPDPAVYQLRDSKSSDKSVCLFTDFDSQTNVSQSKDSDVYITDKTVLDMRSMDFKSNSAVAWSNKSDFACANAFNNSIIPEDTFFPSPESSCDVKLVEKSFETDTNLNFQNLSVIGFRILLLKVAGFNLLMTLRLWS

SEQ ID NO: 568 - protein, 312 aa, Homo sapiens
MGSRLLCWVLLCLLGAGPVKAGVTQTPRYLIKTRGQQVTLSCSPISGHRSVSWYQQTPGQGLQFLFEYFSETQRNKGNFPGRFSGRQFSNSRSEMNVSTLELGDSALYLCASSVWTGVSYEQYFGPGTRLTVTEDLKNVFPPEVAVFEPSEAEISHTQKATLVCLATGFYPDHVELSWWVNGKEVHSGVSTDPQPLKEQPALNDSRYCLSSRLRVSATFWQNPRNHFRCQVQFYGLSENDEWTQDRAKPVTQIVSAEAWGRADCGFTSESYQQGVLSATILYEILLGKATLYAVLVSALVLMAMVKRKDSRG

SEQ ID NO: 569 - protein, 277 aa, Homo sapiens
MTRVSLLWAVVVSTCLESGMAQTVTQSQPEMSVQEAETVTLSCTYDTSENNYYLFWYKQPPSRQMILVIRQEAYKQQNATENRFSVNFQKAAKSFSLKISDSQLGDTAMYFCAFMKTTSGTYKYIFGTGTRLKVLANIIQNPDPAVYQLRDSKSSDKSVCLFTDFDSQTNVSQSKDSDVYITDKTVLDMRSMDFKSNSAVAWSNKSDFACANAFNNSIIPEDTFFPSPESSCDVKLVEKSFETDTNLNFQNLSVIGFRILLLKVAGFNLLMTLRLWS

SEQ ID NO: 570 - protein, 311 aa, Homo sapiens
MSLGLLCCGAFSLLWAGPVNAGVTQTPKFRVLKTGQSMTLLCAQDMNHEYMYWYRQDPGMGLRLIHYSVGEGTTAKGEVPDGYNVSRLKKQNFLLGLESAAPSQTSVYFCASNLRRDSQSYGYTFGSGTRLTVVEDLNKVFPPEVAVFEPSEAEISHTQKATLVCLATGFFPDHVELSWWVNGKEVHSGVSTDPQPLKEQPALNDSRYCLSSRLRVSATFWQNPRNHFRCQVQFYGLSENDEWTQDRAKPVTQIVSAEAWGRADCGFTSVSYQQGVLSATILYEILLGKATLYAVLVSALVLMAMVKRKDF

SEQ ID NO: 571 - protein, 273 aa, Homo sapiens
MKTFAGFSFLFLWLQLDCMSRGEDVEQSLFLSVREGDSSVINCTYTDSSSTYLYWYKQEPGAGLQLLTYIFSNMDMKQDQRLTVLLNKKDKHLSLRIADTQTGDSAIYFCAETLESNTGKLIFGQGTTLQVKPDIQNPDPAVYQLRDSKSSDKSVCLFTDFDSQTNVSQSKDSDVYITDKTVLDMRSMDFKSNSAVAWSNKSDFACANAFNNSIIPEDTFFPSPESSCDVKLVEKSFETDTNLNFQNLSVIGFRILLLKVAGFNLLMTLRLWS

SEQ ID NO: 572 - protein, 324 aa, Homo sapiens
MLLLLLLLGPGISLLLPGSLAGSGLGAVVSQHPSWVICKSGTSVKIECRSLDFQATTMFWYRQFPKQSLMLMATSNEGSKATYEQGVEKDKFLINHASLTLSTLTVTSAHPEDSSFYICSASRIEGQLPEAQKIFFGPGTRLTVLEDLKNVFPPEVAVFEPSEAEISHTQKATLVCLATGFYPDHVELSWWVNGKEVHSGVSTDPQPLKEQPALNDSRYCLSSRLRVSATFWQNPRNHFRCQVQFYGLSENDEWTQDRAKPVTQIVSAEAWGRADCGFTSESYQQGVLSATILYEILLGKATLYAVLVSALVLMAMVKRKDSRG

SEQ ID NO: 573 - protein, 277 aa, Homo sapiens
MAMLLGASVLILWLQPDWVNSQQKNDDQQVKQNSPSLSVQEGRISILNCDYTNSMFDYFLWYKKYPAEGPTFLISISSIKDKNEDGRFTVFLNKSAKHLSLHIVPSQPGDSAVYFCAASEAEGNLIFGKGTKLSVKPNIQNPDPAVYQLRDSKSSDKSVCLFTDFDSQTNVSQSKDSDVYITDKTVLDMRSMDFKSNSAVAWSNKSDFACANAFNNSIIPEDTFFPSPESSCDVKLVEKSFETDTNLNFQNLSVIGFRILLLKVAGFNLLMTLRLWS

SEQ ID NO: 574 - protein, 318 aa, Homo sapiens
MGCRLLCCAVLCLLGAGELVPMETGVTQTPRHLVMGMTNKKSLKCEQHLGHNAMYWYKQSAKKPLELMFVYSLEERVENNSVPSRFSPECPNSSHLFLHLHTLQPEDSALYLCASSQDWELAGGSKTQYFGPGTRLLVLEDLKNVFPPEVAVFEPSEAEISHTQKATLVCLATGFYPDHVELSWWVNGKEVHSGVSTDPQPLKEQPALNDSRYCLSSRLRVSATFWQNPRNHFRCQVQFYGLSENDEWTQDRAKPVTQIVSAEAWGRADCGFTSESYQQGVLSATILYEILLGKATLYAVLVSALVLMAMVKRKDSRG

SEQ ID NO: 575 - protein, 275 aa, Homo sapiens
MACPGFLWALVISTCLEFSMAQTVTQSQPEMSVQEAETVTLSCTYDTSESDYYLFWYKQPPSRQMILVIRQEAYKQQNATENRFSVNFQKAAKSFSLKISDSQLGDAAMYFCAYMLRAAGNKLTFGGGTRVLVKPNIQNPDPAVYQLRDSKSSDKSVCLFTDFDSQTNVSQSKDSDVYITDKTVLDMRSMDFKSNSAVAWSNKSDFACANAFNNSIIPEDTFFPSPESSCDVKLVEKSFETDTNLNFQNLSVIGFRILLLKVAGFNLLMTLRLWS

SEQ ID NO: 576 - protein, 314 aa, Homo sapiens
MSNQVLCCVVLCFLGANTVDGGITQSPKYLFRKEGQNVTLSCEQNLNHDAMYWYRQDPGQGLRLIYYSQIVNDFQKGDIAEGYSVSREKKESFPLTVTSAQKNPTAFYLCASSLLLAGGPRDTQYFGPGTRLTVLEDLKNVFPPEVAVFEPSEAEISHTQKATLVCLATGFYPDHVELSWWVNGKEVHSGVSTDPQPLKEQPALNDSRYCLSSRLRVSATFWQNPRNHFRCQVQFYGLSENDEWTQDRAKPVTQIVSAEAWGRADCGFTSESYQQGVLSATILYEILLGKATLYAVLVSALVLMAMVKRKDSRG

SEQ ID NO: 577 - protein, 271 aa, Homo sapiens
MVKIRQFLLAILWLQLSCVSAAKNEVEQSPQNLTAQEGEFITINCSYSVGISALHWLQQHPGGGIVSLFMLSSGKKKHGRLIATINIQEKHSSLHITASHPRDSAVYICAAMRTSGSRLTFGEGTQLTVNPDIQNPDPAVYQLRDSKSSDKSVCLFTDFDSQTNVSQSKDSDVYITDKTVLDMRSMDFKSNSAVAWSNKSDFACANAFNNSIIPEDTFFPSPESSCDVKLVEKSFETDTNLNFQNLSVIGFRILLLKVAGFNLLMTLRLWS

SEQ ID NO: 578 - protein, 310 aa, Homo sapiens
MGSRLLCWVLLCLLGAGPVKAGVTQTPRYLIKTRGQQVTLSCSPISGHRSVSWYQQTPGQGLQFLFEYFSETQRNKGNFPGRFSGRQFSNSRSEMNVSTLELGDSALYLCASSTWTGTGNTIYFGEGSWLTVVEDLNKVFPPEVAVFEPSEAEISHTQKATLVCLATGFFPDHVELSWWVNGKEVHSGVSTDPQPLKEQPALNDSRYCLSSRLRVSATFWQNPRNHFRCQVQFYGLSENDEWTQDRAKPVTQIVSAEAWGRADCGFTSVSYQQGVLSATILYEILLGKATLYAVLVSALVLMAMVKRKDF

SEQ ID NO: 579 - protein, 270 aa, Homo sapiens
MKRILGALLGLLSAQVCCVRGIQVEQSPPDLILQEGANSTLRCNFSDSVNNLQWFHQNPWGQLINLFYIPSGTKQNGRLSATTVATERYSLLYISSSQTTDSGVYFCAVGGETSGSRLTFGEGTQLTVNPDIQNPDPAVYQLRDSKSSDKSVCLFTDFDSQTNVSQSKDSDVYITDKTVLDMRSMDFKSNSAVAWSNKSDFACANAFNNSIIPEDTFFPSPESSCDVKLVEKSFETDTNLNFQNLSVIGFRILLLKVAGFNLLMTLRLWS

SEQ ID NO: 580 - protein, 312 aa, Homo sapiens
MGSRLLCWVLLCLLGAGPVKAGVTQTPRYLIKTRGQQVTLSCSPISGHRSVSWYQQTPGQGLQFLFEYFSETQRNKGNFPGRFSGRQFSNSRSEMNVSTLELGDSALYLCASSLWTGSGREQYFGPGTRLTVTEDLKNVFPPEVAVFEPSEAEISHTQKATLVCLATGFYPDHVELSWWVNGKEVHSGVSTDPQPLKEQPALNDSRYCLSSRLRVSATFWQNPRNHFRCQVQFYGLSENDEWTQDRAKPVTQIVSAEAWGRADCGFTSESYQQGVLSATILYEILLGKATLYAVLVSALVLMAMVKRKDSRG

SEQ ID NO: 581 - protein, 268 aa, Homo sapiens
MWGVFLLYVSMKMGGTTGQNIDQPTEMTATEGAIVQINCTYQTSGFNGLFWYQQHAGEAPTFLSYNVLDGLEEKGRFSSFLSRSKGYSYLLLKELQMKDSASYLCAASSGAGSYQLTFGKGTKLSVIPNIQNPDPAVYQLRDSKSSDKSVCLFTDFDSQTNVSQSKDSDVYITDKTVLDMRSMDFKSNSAVAWSNKSDFACANAFNNSIIPEDTFFPSPESSCDVKLVEKSFETDTNLNFQNLSVIGFRILLLKVAGFNLLMTLRLWS

SEQ ID NO: 582 - protein, 312 aa, Homo sapiens
MTIRLLCYMGFYFLGAGLMEADIYQTPRYLVIGTGKKITLECSQTMGHDKMYWYQQDPGMELHLIHYSYGVNSTEKGDLSSESTVSRIRTEHFPLTLESARPSHTSQYLCASSEYRGRQETQYFGPGTRLLVLEDLKNVFPPEVAVFEPSEAEISHTQKATLVCLATGFYPDHVELSWWVNGKEVHSGVSTDPQPLKEQPALNDSRYCLSSRLRVSATFWQNPRNHFRCQVQFYGLSENDEWTQDRAKPVTQIVSAEAWGRADCGFTSESYQQGVLSATILYEILLGKATLYAVLVSALVLMAMVKRKDSRG

SEQ ID NO: 583 - protein, 267 aa, Homo sapiens
MLLITSMLVLWMQLSQVNGQQVMQIPQYQHVQEGEDFTTYCNSSTTLSNIQWYKQRPGGHPVFLIQLVKSGEVKKQKRLTFQFGEAKKNSSLHITATQTTDVGTYFCAGPSGYALNFGKGTSLLVTPHIQNPDPAVYQLRDSKSSDKSVCLFTDFDSQTNVSQSKDSDVYITDKTVLDMRSMDFKSNSAVAWSNKSDFACANAFNNSIIPEDTFFPSPESSCDVKLVEKSFETDTNLNFQNLSVIGFRILLLKVAGFNLLMTLRLWS

SEQ ID NO: 584 - protein, 311 aa, Homo sapiens
MGPGLLHWMALCLLGTGHGDAMVIQNPRYQVTQFGKPVTLSCSQTLNHNVMYWYQQKSSQAPKLLFHYYDKDFNNEADTPDNFQSRRPNTSFCFLDIRSPGLGDTAMYLCATSSGTFDSNQPQHFGDGTRLSILEDLNKVFPPEVAVFEPSEAEISHTQKATLVCLATGFFPDHVELSWWVNGKEVHSGVSTDPQPLKEQPALNDSRYCLSSRLRVSATFWQNPRNHFRCQVQFYGLSENDEWTQDRAKPVTQIVSAEAWGRADCGFTSVSYQQGVLSATILYEILLGKATLYAVLVSALVLMAMVKRKDF

SEQ ID NO: 585 - protein, 277 aa, Homo sapiens
MLLEHLLIILWMQLTWVSGQQLNQSPQSMFIQEGEDVSMNCTSSSIFNTWLWYKQEPGEGPVLLIALYKAGELTSNGRLTAQFGITRKDSFLNISASIPSDVGIYFCAGQKEGFGNVLHCFGNVLHCGSGTQVIVLPHIQNPDPAVYQLRDSKSSDKSVCLFTDFDSQTNVSQSKDSDVYITDKTVLDMRSMDFKSNSAVAWSNKSDFACANAFNNSIIPEDTFFPSPESSCDVKLVEKSFETDTNLNFQNLSVIGFRILLLKVAGFNLLMTLRLWS

SEQ ID NO: 586 - protein, 312 aa, Homo sapiens
MGSRLLCWVLLCLLGAGPVKAGVTQTPRYLIKTRGQQVTLSCSPISGHRSVSWYQQTPGQGLQFLFEYFSETQRNKGNFPGRFSGRQFSNSRSEMNVSTLELGDSALYLCASGEWTGVGNEQFFGPGTRLTVLEDLKNVFPPEVAVFEPSEAEISHTQKATLVCLATGFYPDHVELSWWVNGKEVHSGVSTDPQPLKEQPALNDSRYCLSSRLRVSATFWQNPRNHFRCQVQFYGLSENDEWTQDRAKPVTQIVSAEAWGRADCGFTSESYQQGVLSATILYEILLGKATLYAVLVSALVLMAMVKRKDSRG

SEQ ID NO: 587 - protein, 271 aa, Homo sapiens
MKRILGALLGLLSAQVCCVRGIQVEQSPPDLILQEGANSTLRCNFSDSVNNLQWFHQNPWGQLINLFYIPSGTKQNGRLSATTVATERYSLLYISSSQTTDSGVYFCAVEREGNTDKLIFGTGTRLQVFPNIIQNPDPAVYQLRDSKSSDKSVCLFTDFDSQTNVSQSKDSDVYITDKTVLDMRSMDFKSNSAVAWSNKSDFACANAFNNSIIPEDTFFPSPESSCDVKLVEKSFETDTNLNFQNLSVIGFRILLLKVAGFNLLMTLRLWS

SEQ ID NO: 588 - protein, 312 aa, Homo sapiens
MGSRLLCWVLLCLLGAGPVKAGVTQTPRYLIKTRGQQVTLSCSPISGHRSVSWYQQTPGQGLQFLFEYFSETQRNKGNFPGRFSGRQFSNSRSEMNVSTLELGDSALYLCASSLWTGLGNEQFFGPGTRLTVLEDLKNVFPPEVAVFEPSEAEISHTQKATLVCLATGFYPDHVELSWWVNGKEVHSGVSTDPQPLKEQPALNDSRYCLSSRLRVSATFWQNPRNHFRCQVQFYGLSENDEWTQDRAKPVTQIVSAEAWGRADCGFTSESYQQGVLSATILYEILLGKATLYAVLVSALVLMAMVKRKDSRG

SEQ ID NO: 589 - protein, 266 aa, Homo sapiens
MLLEHLLIILWMQLTWVSGQQLNQSPQSMFIQEGEDVSMNCTSSSIFNTWLWYKQEPGEGPVLLIALYKAGELTSNGRLTAQFGITRKDSFLNISASIPSDVGIYFCAGINNDMRFGAGTRLTVKPNIQNPDPAVYQLRDSKSSDKSVCLFTDFDSQTNVSQSKDSDVYITDKTVLDMRSMDFKSNSAVAWSNKSDFACANAFNNSIIPEDTFFPSPESSCDVKLVEKSFETDTNLNFQNLSVIGFRILLLKVAGFNLLMTLRLWS

SEQ ID NO: 590 - protein, 318 aa, Homo sapiens
MDTRVLCCAVICLLGAGLSNAGVMQNPRHLVRRRGQEARLRCSPMKGHSHVYWYRQLPEEGLKFMVYLQKENIIDESGMPKERFSAEFPKEGPSILRIQQVVRGDSAAYFCASSPYSRLDGTRAKNIQYFGAGTRLSVLEDLKNVFPPEVAVFEPSEAEISHTQKATLVCLATGFYPDHVELSWWVNGKEVHSGVSTDPQPLKEQPALNDSRYCLSSRLRVSATFWQNPRNHFRCQVQFYGLSENDEWTQDRAKPVTQIVSAEAWGRADCGFTSESYQQGVLSATILYEILLGKATLYAVLVSALVLMAMVKRKDSRG

SEQ ID NO: 591 - protein, 276 aa, Homo sapiens
MACPGFLWALVISTCLEFSMAQTVTQSQPEMSVQEAETVTLSCTYDTSESDYYLFWYKQPPSRQMILVIRQEAYKQQNATENRFSVNFQKAAKSFSLKISDSQLGDAAMYFCAYLRPRNNNARLMFGDGTQLVVKPNIQNPDPAVYQLRDSKSSDKSVCLFTDFDSQTNVSQSKDSDVYITDKTVLDMRSMDFKSNSAVAWSNKSDFACANAFNNSIIPEDTFFPSPESSCDVKLVEKSFETDTNLNFQNLSVIGFRILLLKVAGFNLLMTLRLWS

SEQ ID NO: 592 - protein, 315 aa, Homo sapiens
MGCRLLCCVVFCLLQAGPLDTAVSQTPKYLVTQMGNDKSIKCEQNLGHDTMYWYKQDSKKFLKIMFSYNNKELIINETVPNRFSPKSPDKAHLNLHINSLELGDSAVYFCASSQDWRTGGNFLDEKLFFGSGTQLSVLEDLNKVFPPEVAVFEPSEAEISHTQKATLVCLATGFFPDHVELSWWVNGKEVHSGVSTDPQPLKEQPALNDSRYCLSSRLRVSATFWQNPRNHFRCQVQFYGLSENDEWTQDRAKPVTQIVSAEAWGRADCGFTSVSYQQGVLSATILYEILLGKATLYAVLVSALVLMAMVKRKDF

SEQ ID NO: 593 - protein, 274 aa, Homo sapiens
MISLRVLLVILWLQLSWVWSQRKEVEQDPGPFNVPEGATVAFNCTYSNSASQSFFWYRQDCRKEPKLLMSVYSSGNEDGRFTAQLNRASQYISLLIRDSKLSDSATYLCVVNPPPGGGADGLTFGKGTHLIIQPYIQNPDPAVYQLRDSKSSDKSVCLFTDFDSQTNVSQSKDSDVYITDKTVLDMRSMDFKSNSAVAWSNKSDFACANAFNNSIIPEDTFFPSPESSCDVKLVEKSFETDTNLNFQNLSVIGFRILLLKVAGFNLLMTLRLWS

SEQ ID NO: 594 - protein, 315 aa, Homo sapiens
MSNQVLCCVVLCFLGANTVDGGITQSPKYLFRKEGQNVTLSCEQNLNHDAMYWYRQDPGQGLRLIYYSQIVNDFQKGDIAEGYSVSREKKESFPLTVTSAQKNPTAFYLCASSIVAGALSGANVLTFGAGSRLTVLEDLKNVFPPEVAVFEPSEAEISHTQKATLVCLATGFYPDHVELSWWVNGKEVHSGVSTDPQPLKEQPALNDSRYCLSSRLRVSATFWQNPRNHFRCQVQFYGLSENDEWTQDRAKPVTQIVSAEAWGRADCGFTSESYQQGVLSATILYEILLGKATLYAVLVSALVLMAMVKRKDSRG

SEQ ID NO: 595 - protein, 273 aa, Homo sapiens
MLLELIPLLGIHFVLRTARAQSVTQPDIHITVSEGASLELRCNYSYGATPYLFWYVQSPGQGLQLLLKYFSGDTLVQGIKGFEAEFKRSQSSFNLRKPSVHWSDAAEYFCAVGSYGGSYIPTFGRGTSLIVHPYIQNPDPAVYQLRDSKSSDKSVCLFTDFDSQTNVSQSKDSDVYITDKTVLDMRSMDFKSNSAVAWSNKSDFACANAFNNSIIPEDTFFPSPESSCDVKLVEKSFETDTNLNFQNLSVIGFRILLLKVAGFNLLMTLRLWS

SEQ ID NO: 596 - protein, 309 aa, Homo sapiens
MLSLLLLLLGLGSVFSAVISQKPSRDICQRGTSLTIQCQVDSQVTMMFWYRQQPGQSLTLIATANQGSEATYESGFVIDKFPISRPNLTFSTLTVSNMSPEDSSIYLCSYRRVSEGNEQFFGPGTRLTVLEDLKNVFPPEVAVFEPSEAEISHTQKATLVCLATGFYPDHVELSWWVNGKEVHSGVSTDPQPLKEQPALNDSRYCLSSRLRVSATFWQNPRNHFRCQVQFYGLSENDEWTQDRAKPVTQIVSAEAWGRADCGFTSESYQQGVLSATILYEILLGKATLYAVLVSALVLMAMVKRKDSRG

SEQ ID NO: 597 - protein, 271 aa, Homo sapiens
MISLRVLLVILWLQLSWVWSQRKEVEQDPGPFNVPEGATVAFNCTYSNSASQSFFWYRQDCRKEPKLLMSVYSSGNEDGRFTAQLNRASQYISLLIRDSKLSDSATYLCVVKREGANNLFFGTGTRLTVIPYIQNPDPAVYQLRDSKSSDKSVCLFTDFDSQTNVSQSKDSDVYITDKTVLDMRSMDFKSNSAVAWSNKSDFACANAFNNSIIPEDTFFPSPESSCDVKLVEKSFETDTNLNFQNLSVIGFRILLLKVAGFNLLMTLRLWS

SEQ ID NO: 598 - protein, 268 aa, Homo sapiens
MKRILGALLGLLSAQVCCVRGIQVEQSPPDLILQEGANSTLRCNFSDSVNNLQWFHQNPWGQLINLFYIPSGTKQNGRLSATTVATERYSLLYISSSQTTDSGVYFCAVHFGNEKLTFGTGTRLTIIPNIQNPDPAVYQLRDSKSSDKSVCLFTDFDSQTNVSQSKDSDVYITDKTVLDMRSMDFKSNSAVAWSNKSDFACANAFNNSIIPEDTFFPSPESSCDVKLVEKSFETDTNLNFQNLSVIGFRILLLKVAGFNLLMTLRLWS

SEQ ID NO: 599 - protein, 311 aa, Homo sapiens
MGCRLLCCAVLCLLGAVPMETGVTQTPRHLVMGMTNKKSLKCEQHLGHNAMYWYKQSAKKPLELMFVYNFKEQTENNSVPSRFSPECPNSSHLFLHLHTLQPEDSALYLCASSQTGGSETQYFGPGTRLLVLEDLKNVFPPEVAVFEPSEAEISHTQKATLVCLATGFYPDHVELSWWVNGKEVHSGVSTDPQPLKEQPALNDSRYCLSSRLRVSATFWQNPRNHFRCQVQFYGLSENDEWTQDRAKPVTQIVSAEAWGRADCGFTSESYQQGVLSATILYEILLGKATLYAVLVSALVLMAMVKRKDSRG

SEQ ID NO: 600 - protein, 268 aa, Homo sapiens
MISLRVLLVILWLQLSWVWSQRKEVEQDPGPFNVPEGATVAFNCTYSNSASQSFFWYRQDCRKEPKLLMSVYSSGNEDGRFTAQLNRASQYISLLIRDSKLSDSATYLCVVTRGDMRFGAGTRLTVKPNIQNPDPAVYQLRDSKSSDKSVCLFTDFDSQTNVSQSKDSDVYITDKTVLDMRSMDFKSNSAVAWSNKSDFACANAFNNSIIPEDTFFPSPESSCDVKLVEKSFETDTNLNFQNLSVIGFRILLLKVAGFNLLMTLRLWS

SEQ ID NO: 601 - protein, 312 aa, Homo sapiens
MGCRLLCCAVLCLLGAVPIDTEVTQTPKHLVMGMTNKKSLKCEQHMGHRAMYWYKQKAKKPPELMFVYSYEKLSINESVPSRFSPECPNSSLLNLHLHALQPEDSALYLCASSQVEGSGYEQYFGPGTRLTVTEDLKNVFPPEVAVFEPSEAEISHTQKATLVCLATGFYPDHVELSWWVNGKEVHSGVSTDPQPLKEQPALNDSRYCLSSRLRVSATFWQNPRNHFRCQVQFYGLSENDEWTQDRAKPVTQIVSAEAWGRADCGFTSESYQQGVLSATILYEILLGKATLYAVLVSALVLMAMVKRKDSRG

SEQ ID NO: 602 - protein, 272 aa, Homo sapiens
MALQSTLGAVWLGLLLNSLWKVAESKDQVFQPSTVASSEGAVVEIFCNHSVSNAYNFFWYLHFPGCAPRLLVKGSKPSQQGRYNMTYERFSSSLLILQVREADAAVYYCAARSYNTDKLIFGTGTRLQVFPNIIQNPDPAVYQLRDSKSSDKSVCLFTDFDSQTNVSQSKDSDVYITDKTVLDMRSMDFKSNSAVAWSNKSDFACANAFNNSIIPEDTFFPSPESSCDVKLVEKSFETDTNLNFQNLSVIGFRILLLKVAGFNLLMTLRLWS

SEQ ID NO: 603 - protein, 319 aa, Homo sapiens
MLSPDLPDSAWNTRLLCHVMLCLLGAVSVAAGVIQSPRHLIKEKRETATLKCYPIPRHDTVYWYQQGPGQDPQFLISFYEKMQSDKGSIPDRFSAQQFSDYHSELNMSSLELGDSALYFCASSLLEDTQYFGPGTRLTVLEDLKNVFPPEVAVFEPSEAEISHTQKATLVCLATGFYPDHVELSWWVNGKEVHSGVSTDPQPLKEQPALNDSRYCLSSRLRVSATFWQNPRNHFRCQVQFYGLSENDEWTQDRAKPVTQIVSAEAWGRADCGFTSESYQQGVLSATILYEILLGKATLYAVLVSALVLMAMVKRKDSRG

SEQ ID NO: 604 - protein, 275 aa, Homo sapiens
MLTASLLRAVIASICVVSSMAQKVTQAQTEISVVEKEDVTLDCVYETRDTTYYLFWYKQPPSGELVFLIRRNSFDEQNEISGRYSWNFQKSTSSFNFTITASQVVDSAVYFCALGFSGSARQLTFGSGTQLTVLPDIQNPDPAVYQLRDSKSSDKSVCLFTDFDSQTNVSQSKDSDVYITDKTVLDMRSMDFKSNSAVAWSNKSDFACANAFNNSIIPEDTFFPSPESSCDVKLVEKSFETDTNLNFQNLSVIGFRILLLKVAGFNLLMTLRLWS

SEQ ID NO: 605 - protein, 273 aa, Homo sapiens
MLLLLIPVLGMIFALRDARAQSVSQHNHHVILSEAASLELGCNYSYGGTVNLFWYVQYPGQHLQLLLKYFSGDPLVKGIKGFEAEFIKSKFSFNLRKPSVQWSDTAEYFCAVNAPSGNTPLVFGKGTRLSVIANIQNPDPAVYQLRDSKSSDKSVCLFTDFDSQTNVSQSKDSDVYITDKTVLDMRSMDFKSNSAVAWSNKSDFACANAFNNSIIPEDTFFPSPESSCDVKLVEKSFETDTNLNFQNLSVIGFRILLLKVAGFNLLMTLRLWS

SEQ ID NO: 606 - protein, 312 aa, Homo sapiens
MDTWLVCWAIFSLLKAGLTEPEVTQTPSHQVTQMGQEVILRCVPISNHLYFYWYRQILGQKVEFLVSFYNNEISEKSEIFDDQFSVERPDGSNFTLKIRSTKLEDSAMYFCASSEGQGGYEQYFGPGTRLTVTEDLKNVFPPEVAVFEPSEAEISHTQKATLVCLATGFYPDHVELSWWVNGKEVHSGVSTDPQPLKEQPALNDSRYCLSSRLRVSATFWQNPRNHFRCQVQFYGLSENDEWTQDRAKPVTQIVSAEAWGRADCGFTSESYQQGVLSATILYEILLGKATLYAVLVSALVLMAMVKRKDSRG

SEQ ID NO: 607 - protein, 10 aa, Severe acute respiratory syndrome coronavirus 2
TTDPSFLGRY

SEQ ID NO: 608 - protein, 270 aa, Homo sapiens
MESFLGGVLLILWLQVDWVKSQKIEQNSEALNIQEGKTATLTCNYTNYSPAYLQWYRQDPGRGPVFLLLIRENEKEKRKERLKVTFDTTLKQSLFHITASQPADSATYLCALSFNKFYFGSGTKLNVKPNIIQNPDPAVYQLRDSKSSDKSVCLFTDFDSQTNVSQSKDSDVYITDKTVLDMRSMDFKSNSAVAWSNKSDFACANAFNNSIIPEDTFFPSPESSCDVKLVEKSFETDTNLNFQNLSVIGFRILLLKVAGFNLLMTLRLWS

SEQ ID NO: 609 - protein, 309 aa, Homo sapiens
MGIRLLCRVAFCFLAVGLVDVKVTQSSRYLVKRTGEKVFLECVQDMDHENMFWYRQDPGLGLRLIYFSYDVKMKEKGDIPEGYSVSREKKERFSLILESASTNQTSMYLCASSFGHSNQPQHFGDGTRLSILEDLNKVFPPEVAVFEPSEAEISHTQKATLVCLATGFFPDHVELSWWVNGKEVHSGVSTDPQPLKEQPALNDSRYCLSSRLRVSATFWQNPRNHFRCQVQFYGLSENDEWTQDRAKPVTQIVSAEAWGRADCGFTSVSYQQGVLSATILYEILLGKATLYAVLVSALVLMAMVKRKDF

SEQ ID NO: 610 - protein, 267 aa, Homo sapiens
MTSIRAVFIFLWLQLDLVNGENVEQHPSTLSVQEGDSAVIKCTYSDSASNYFPWYKQELGKGPQLIIDIRSNVGEKKDQRIAVTLNKTAKHFSLHITETQPEDSAVYFCPADDKIIFGKGTRLHILPNIQNPDPAVYQLRDSKSSDKSVCLFTDFDSQTNVSQSKDSDVYITDKTVLDMRSMDFKSNSAVAWSNKSDFACANAFNNSIIPEDTFFPSPESSCDVKLVEKSFETDTNLNFQNLSVIGFRILLLKVAGFNLLMTLRLWS

SEQ ID NO: 611 - protein, 307 aa, Homo sapiens
MGTSLLCWMALCLLGADHADTGVSQNPRHKITKRGQNVTFRCDPISEHNRLYWYRQTLGQGPEFLTYFQNEAQLEKSRLLSDRFSAERPKGSFSTLEIQRTEQGDSAMYLCASSGDTEAFFGQGTRLTVVEDLNKVFPPEVAVFEPSEAEISHTQKATLVCLATGFFPDHVELSWWVNGKEVHSGVSTDPQPLKEQPALNDSRYCLSSRLRVSATFWQNPRNHFRCQVQFYGLSENDEWTQDRAKPVTQIVSAEAWGRADCGFTSVSYQQGVLSATILYEILLGKATLYAVLVSALVLMAMVKRKDF

SEQ ID NO: 612 - protein, 279 aa, Homo sapiens
MAMLLGASVLILWLQPDWVNSQQKNDDQQVKQNSPSLSVQEGRISILNCDYTNSMFDYFLWYKKYPAEGPTFLISISSIKDKNEDGRFTVFLNKSAKHLSLHIVPSQPGDSAVYFCAASAGFGNEKLTFGTGTRLTIIPNIQNPDPAVYQLRDSKSSDKSVCLFTDFDSQTNVSQSKDSDVYITDKTVLDMRSMDFKSNSAVAWSNKSDFACANAFNNSIIPEDTFFPSPESSCDVKLVEKSFETDTNLNFQNLSVIGFRILLLKVAGFNLLMTLRLWS

SEQ ID NO: 613 - protein, 270 aa, Homo sapiens
MNYSPGLVSLILLLLGRTRGNSVTQMEGPVTLSEEAFLTINCTYTATGYPSLFWYVQYPGEGLQLLLKATKADDKGSNKGFEATYRKETTSFHLEKGSVQVSDSAVYFCALGGSQGNLIFGKGTKLSVKPNIQNPDPAVYQLRDSKSSDKSVCLFTDFDSQTNVSQSKDSDVYITDKTVLDMRSMDFKSNSAVAWSNKSDFACANAFNNSIIPEDTFFPSPESSCDVKLVEKSFETDTNLNFQNLSVIGFRILLLKVAGFNLLMTLRLWS

SEQ ID NO: 614 - protein, 311 aa, Homo sapiens
MGPQLLGYVVLCLLGAGPLEAQVTQNPRYLITVTGKKLTVTCSQNMNHEYMSWYRQDPGLGLRQIYYSMNVEVTDKGDVPEGYKVSRKEKRNFPLILESPSPNQTSLYFCASSLSSGFDEQYFGPGTRLTVTEDLKNVFPPEVAVFEPSEAEISHTQKATLVCLATGFYPDHVELSWWVNGKEVHSGVSTDPQPLKEQPALNDSRYCLSSRLRVSATFWQNPRNHFRCQVQFYGLSENDEWTQDRAKPVTQIVSAEAWGRADCGFTSESYQQGVLSATILYEILLGKATLYAVLVSALVLMAMVKRKDSRG

SEQ ID NO: 615 - protein, 269 aa, Homo sapiens
MESFLGGVLLILWLQVDWVKSQKIEQNSEALNIQEGKTATLTCNYTNYSPAYLQWYRQDPGRGPVFLLLIRENEKEKRKERLKVTFDTTLKQSLFHITASQPADSATYLCALAFARLMFGDGTQLVVKPNIQNPDPAVYQLRDSKSSDKSVCLFTDFDSQTNVSQSKDSDVYITDKTVLDMRSMDFKSNSAVAWSNKSDFACANAFNNSIIPEDTFFPSPESSCDVKLVEKSFETDTNLNFQNLSVIGFRILLLKVAGFNLLMTLRLWS

SEQ ID NO: 616 - protein, 309 aa, Homo sapiens
MGIRLLCRVAFCFLAVGLVDVKVTQSSRYLVKRTGEKVFLECVQDMDHENMFWYRQDPGLGLRLIYFSYDVKMKEKGDIPEGYSVSREKKERFSLILESASTNQTSMYLCASNLGGSNQPQHFGDGTRLSILEDLNKVFPPEVAVFEPSEAEISHTQKATLVCLATGFFPDHVELSWWVNGKEVHSGVSTDPQPLKEQPALNDSRYCLSSRLRVSATFWQNPRNHFRCQVQFYGLSENDEWTQDRAKPVTQIVSAEAWGRADCGFTSVSYQQGVLSATILYEILLGKATLYAVLVSALVLMAMVKRKDF

SEQ ID NO: 617 - protein, 271 aa, Homo sapiens
MLLLLVPVLEVIFTLGGTRAQSVTQLGSHVSVSEGALVLLRCNYSSSVPPYLFWYVQYPNQGLQLLLKYTSAATLVKGINGFEAEFKKSETSFHLTKPSAHMSDAAEYFCAVSGYGNKLVFGAGTILRVKSYIQNPDPAVYQLRDSKSSDKSVCLFTDFDSQTNVSQSKDSDVYITDKTVLDMRSMDFKSNSAVAWSNKSDFACANAFNNSIIPEDTFFPSPESSCDVKLVEKSFETDTNLNFQNLSVIGFRILLLKVAGFNLLMTLRLWS

SEQ ID NO: 618 - protein, 311 aa, Homo sapiens
MGPQLLGYVVLCLLGAGPLEAQVTQNPRYLITVTGKKLTVTCSQNMNHEYMSWYRQDPGLGLRQIYYSMNVEVTDKGDVPEGYKVSRKEKRNFPLILESPSPNQTSLYFCASTPRGPADTQYFGPGTRLTVLEDLKNVFPPEVAVFEPSEAEISHTQKATLVCLATGFYPDHVELSWWVNGKEVHSGVSTDPQPLKEQPALNDSRYCLSSRLRVSATFWQNPRNHFRCQVQFYGLSENDEWTQDRAKPVTQIVSAEAWGRADCGFTSESYQQGVLSATILYEILLGKATLYAVLVSALVLMAMVKRKDSRG

SEQ ID NO: 619 - protein, 269 aa, Homo sapiens
MTSIRAVFIFLWLQLDLVNGENVEQHPSTLSVQEGDSAVIKCTYSDSASNYFPWYKQELGKGPQLIIDIRSNVGEKKDQRIAVTLNKTAKHFSLHITETQPEDSAVYFCAVNTGNQFYFGTGTSLTVIPNIQNPDPAVYQLRDSKSSDKSVCLFTDFDSQTNVSQSKDSDVYITDKTVLDMRSMDFKSNSAVAWSNKSDFACANAFNNSIIPEDTFFPSPESSCDVKLVEKSFETDTNLNFQNLSVIGFRILLLKVAGFNLLMTLRLWS

SEQ ID NO: 620 - protein, 309 aa, Homo sapiens
MGPQLLGYVVLCLLGAGPLEAQVTQNPRYLITVTGKKLTVTCSQNMNHEYMSWYRQDPGLGLRQIYYSMNVEVTDKGDVPEGYKVSRKEKRNFPLILESPSPNQTSLYFCASSPDSSNQPQHFGDGTRLSILEDLNKVFPPEVAVFEPSEAEISHTQKATLVCLATGFFPDHVELSWWVNGKEVHSGVSTDPQPLKEQPALNDSRYCLSSRLRVSATFWQNPRNHFRCQVQFYGLSENDEWTQDRAKPVTQIVSAEAWGRADCGFTSVSYQQGVLSATILYEILLGKATLYAVLVSALVLMAMVKRKDF

SEQ ID NO: 621 - protein, 271 aa, Homo sapiens
MNYSPGLVSLILLLLGRTRGNSVTQMEGPVTLSEEAFLTINCTYTATGYPSLFWYVQYPGEGLQLLLKATKADDKGSNKGFEATYRKETTSFHLEKGSVQVSDSAVYFCALSGSYGNKLVFGAGTILRVKSYIQNPDPAVYQLRDSKSSDKSVCLFTDFDSQTNVSQSKDSDVYITDKTVLDMRSMDFKSNSAVAWSNKSDFACANAFNNSIIPEDTFFPSPESSCDVKLVEKSFETDTNLNFQNLSVIGFRILLLKVAGFNLLMTLRLWS

SEQ ID NO: 622 - protein, 314 aa, Homo sapiens
MGIRLLCRVAFCFLAVGLVDVKVTQSSRYLVKRTGEKVFLECVQDMDHENMFWYRQDPGLGLRLIYFSYDVKMKEKGDIPEGYSVSREKKERFSLILESASTNQTSMYLCASSFPGRGSSYNEQFFGPGTRLTVLEDLKNVFPPEVAVFEPSEAEISHTQKATLVCLATGFYPDHVELSWWVNGKEVHSGVSTDPQPLKEQPALNDSRYCLSSRLRVSATFWQNPRNHFRCQVQFYGLSENDEWTQDRAKPVTQIVSAEAWGRADCGFTSESYQQGVLSATILYEILLGKATLYAVLVSALVLMAMVKRKDSRG

SEQ ID NO: 623 - protein, 279 aa, Homo sapiens
MAMLLGASVLILWLQPDWVNSQQKNDDQQVKQNSPSLSVQEGRISILNCDYTNSMFDYFLWYKKYPAEGPTFLISISSIKDKNEDGRFTVFLNKSAKHLSLHIVPSQPGDSAVYFCAASAGLGANNLFFGTGTRLTVIPYIQNPDPAVYQLRDSKSSDKSVCLFTDFDSQTNVSQSKDSDVYITDKTVLDMRSMDFKSNSAVAWSNKSDFACANAFNNSIIPEDTFFPSPESSCDVKLVEKSFETDTNLNFQNLSVIGFRILLLKVAGFNLLMTLRLWS

SEQ ID NO: 624 - protein, 303 aa, Homo sapiens
MLSLLLLLLGLGSVFSAVISQKPSRDICQRGTSLTIQCQVDSQVTMMFWYRQQPGQSLTLIATANQGSEATYESGFVIDKFPISRPNLTFSTLTVSNMSPEDSSIYLCSVGDYGYTFGSGTRLTVVEDLNKVFPPEVAVFEPSEAEISHTQKATLVCLATGFFPDHVELSWWVNGKEVHSGVSTDPQPLKEQPALNDSRYCLSSRLRVSATFWQNPRNHFRCQVQFYGLSENDEWTQDRAKPVTQIVSAEAWGRADCGFTSVSYQQGVLSATILYEILLGKATLYAVLVSALVLMAMVKRKDF

SEQ ID NO: 625 - protein, 268 aa, Homo sapiens
MNYSPGLVSLILLLLGRTRGNSVTQMEGPVTLSEEAFLTINCTYTATGYPSLFWYVQYPGEGLQLLLKATKADDKGSNKGFEATYRKETTSFHLEKGSVQVSDSAVYFCALGDNDMRFGAGTRLTVKPNIQNPDPAVYQLRDSKSSDKSVCLFTDFDSQTNVSQSKDSDVYITDKTVLDMRSMDFKSNSAVAWSNKSDFACANAFNNSIIPEDTFFPSPESSCDVKLVEKSFETDTNLNFQNLSVIGFRILLLKVAGFNLLMTLRLWS

SEQ ID NO: 626 - protein, 313 aa, Homo sapiens
MSLGLLCCGAFSLLWAGPVNAGVTQTPKFRVLKTGQSMTLLCAQDMNHEYMYWYRQDPGMGLRLIHYSVGEGTTAKGEVPDGYNVSRLKKQNFLLGLESAAPSQTSVYFCASSTAASGRPGEQFFGPGTRLTVLEDLKNVFPPEVAVFEPSEAEISHTQKATLVCLATGFYPDHVELSWWVNGKEVHSGVSTDPQPLKEQPALNDSRYCLSSRLRVSATFWQNPRNHFRCQVQFYGLSENDEWTQDRAKPVTQIVSAEAWGRADCGFTSESYQQGVLSATILYEILLGKATLYAVLVSALVLMAMVKRKDSRG

SEQ ID NO: 627 - protein, 266 aa, Homo sapiens
MTSIRAVFIFLWLQLDLVNGENVEQHPSTLSVQEGDSAVIKCTYSDSASNYFPWYKQELGKGPQLIIDIRSNVGEKKDQRIAVTLNKTAKHFSLHITETQPEDSAVYFCALRQLTFGSGTQLTVLPDIQNPDPAVYQLRDSKSSDKSVCLFTDFDSQTNVSQSKDSDVYITDKTVLDMRSMDFKSNSAVAWSNKSDFACANAFNNSIIPEDTFFPSPESSCDVKLVEKSFETDTNLNFQNLSVIGFRILLLKVAGFNLLMTLRLWS

SEQ ID NO: 628 - protein, 308 aa, Homo sapiens
MSLGLLCCGAFSLLWAGPVNAGVTQTPKFRVLKTGQSMTLLCAQDMNHEYMYWYRQDPGMGLRLIHYSVGEGTTAKGEVPDGYNVSRLKKQNFLLGLESAAPSQTSVYFCASSYEGWTEAFFGQGTRLTVVEDLNKVFPPEVAVFEPSEAEISHTQKATLVCLATGFFPDHVELSWWVNGKEVHSGVSTDPQPLKEQPALNDSRYCLSSRLRVSATFWQNPRNHFRCQVQFYGLSENDEWTQDRAKPVTQIVSAEAWGRADCGFTSVSYQQGVLSATILYEILLGKATLYAVLVSALVLMAMVKRKDF

SEQ ID NO: 629 - protein, 269 aa, Homo sapiens
MNYSPGLVSLILLLLGRTRGNSVTQMEGPVTLSEEAFLTINCTYTATGYPSLFWYVQYPGEGLQLLLKATKADDKGSNKGFEATYRKETTSFHLEKGSVQVSDSAVYFCALHTDKLIFGTGTRLQVFPNIIQNPDPAVYQLRDSKSSDKSVCLFTDFDSQTNVSQSKDSDVYITDKTVLDMRSMDFKSNSAVAWSNKSDFACANAFNNSIIPEDTFFPSPESSCDVKLVEKSFETDTNLNFQNLSVIGFRILLLKVAGFNLLMTLRLWS

SEQ ID NO: 630 - protein, 311 aa, Homo sapiens
MGPQLLGYVVLCLLGAGPLEAQVTQNPRYLITVTGKKLTVTCSQNMNHEYMSWYRQDPGLGLRQIYYSMNVEVTDKGDVPEGYKVSRKEKRNFPLILESPSPNQTSLYFCASSSRSGADTQYFGPGTRLTVLEDLKNVFPPEVAVFEPSEAEISHTQKATLVCLATGFYPDHVELSWWVNGKEVHSGVSTDPQPLKEQPALNDSRYCLSSRLRVSATFWQNPRNHFRCQVQFYGLSENDEWTQDRAKPVTQIVSAEAWGRADCGFTSESYQQGVLSATILYEILLGKATLYAVLVSALVLMAMVKRKDSRG

SEQ ID NO: 631 - protein, 270 aa, Homo sapiens
MNYSPGLVSLILLLLGRTRGNSVTQMEGPVTLSEEAFLTINCTYTATGYPSLFWYVQYPGEGLQLLLKATKADDKGSNKGFEATYRKETTSFHLEKGSVQVSDSAVYFCALSDGRGNLIFGKGTKLSVKPNIQNPDPAVYQLRDSKSSDKSVCLFTDFDSQTNVSQSKDSDVYITDKTVLDMRSMDFKSNSAVAWSNKSDFACANAFNNSIIPEDTFFPSPESSCDVKLVEKSFETDTNLNFQNLSVIGFRILLLKVAGFNLLMTLRLWS

SEQ ID NO: 632 - protein, 311 aa, Homo sapiens
MGPQLLGYVVLCLLGAGPLEAQVTQNPRYLITVTGKKLTVTCSQNMNHEYMSWYRQDPGLGLRQIYYSMNVEVTDKGDVPEGYKVSRKEKRNFPLILESPSPNQTSLYFCASSLSSGVEEQFFGPGTRLTVLEDLKNVFPPEVAVFEPSEAEISHTQKATLVCLATGFYPDHVELSWWVNGKEVHSGVSTDPQPLKEQPALNDSRYCLSSRLRVSATFWQNPRNHFRCQVQFYGLSENDEWTQDRAKPVTQIVSAEAWGRADCGFTSESYQQGVLSATILYEILLGKATLYAVLVSALVLMAMVKRKDSRG

SEQ ID NO: 633 - protein, 271 aa, Homo sapiens
MALQSTLGAVWLGLLLNSLWKVAESKDQVFQPSTVASSEGAVVEIFCNHSVSNAYNFFWYLHFPGCAPRLLVKGSKPSQQGRYNMTYERFSSSLLILQVREADAAVYYCAVWDNQGGKLIFGQGTELSVKPNIQNPDPAVYQLRDSKSSDKSVCLFTDFDSQTNVSQSKDSDVYITDKTVLDMRSMDFKSNSAVAWSNKSDFACANAFNNSIIPEDTFFPSPESSCDVKLVEKSFETDTNLNFQNLSVIGFRILLLKVAGFNLLMTLRLWS

SEQ ID NO: 634 - protein, 269 aa, Homo sapiens
MNYSPGLVSLILLLLGRTRGNSVTQMEGPVTLSEEAFLTINCTYTATGYPSLFWYVQYPGEGLQLLLKATKADDKGSNKGFEATYRKETTSFHLEKGSVQVSDSAVYFCALSDQNDMRFGAGTRLTVKPNIQNPDPAVYQLRDSKSSDKSVCLFTDFDSQTNVSQSKDSDVYITDKTVLDMRSMDFKSNSAVAWSNKSDFACANAFNNSIIPEDTFFPSPESSCDVKLVEKSFETDTNLNFQNLSVIGFRILLLKVAGFNLLMTLRLWS

SEQ ID NO: 635 - protein, 311 aa, Homo sapiens
MGPQLLGYVVLCLLGAGPLEAQVTQNPRYLITVTGKKLTVTCSQNMNHEYMSWYRQDPGLGLRQIYYSMNVEVTDKGDVPEGYKVSRKEKRNFPLILESPSPNQTSLYFCASSPRGGPETQYFGPGTRLLVLEDLKNVFPPEVAVFEPSEAEISHTQKATLVCLATGFYPDHVELSWWVNGKEVHSGVSTDPQPLKEQPALNDSRYCLSSRLRVSATFWQNPRNHFRCQVQFYGLSENDEWTQDRAKPVTQIVSAEAWGRADCGFTSESYQQGVLSATILYEILLGKATLYAVLVSALVLMAMVKRKDSRG

SEQ ID NO: 636 - protein, 270 aa, Homo sapiens
MNYSPGLVSLILLLLGRTRGNSVTQMEGPVTLSEEAFLTINCTYTATGYPSLFWYVQYPGEGLQLLLKATKADDKGSNKGFEATYRKETTSFHLEKGSVQVSDSAVYFCALTPKNNDMRFGAGTRLTVKPNIQNPDPAVYQLRDSKSSDKSVCLFTDFDSQTNVSQSKDSDVYITDKTVLDMRSMDFKSNSAVAWSNKSDFACANAFNNSIIPEDTFFPSPESSCDVKLVEKSFETDTNLNFQNLSVIGFRILLLKVAGFNLLMTLRLWS

SEQ ID NO: 637 - protein, 311 aa, Homo sapiens
MGPQLLGYVVLCLLGAGPLEAQVTQNPRYLITVTGKKLTVTCSQNMNHEYMSWYRQDPGLGLRQIYYSMNVEVTDKGDVPEGYKVSRKEKRNFPLILESPSPNQTSLYFCASSLSAPADTQYFGPGTRLTVLEDLKNVFPPEVAVFEPSEAEISHTQKATLVCLATGFYPDHVELSWWVNGKEVHSGVSTDPQPLKEQPALNDSRYCLSSRLRVSATFWQNPRNHFRCQVQFYGLSENDEWTQDRAKPVTQIVSAEAWGRADCGFTSESYQQGVLSATILYEILLGKATLYAVLVSALVLMAMVKRKDSRG

SEQ ID NO: 638 - protein, 277 aa, Homo sapiens
MAGIRALFMYLWLQLDWVSRGESVGLHLPTLSVQEGDNSIINCAYSNSASDYFIWYKQESGKGPQFIIDIRSNMDKRQGQRVTVLLNKTVKHLSLQIAATQPGDSAVYFCARGFGNVLHCFGNVLHCGSGTQVIVLPHIQNPDPAVYQLRDSKSSDKSVCLFTDFDSQTNVSQSKDSDVYITDKTVLDMRSMDFKSNSAVAWSNKSDFACANAFNNSIIPEDTFFPSPESSCDVKLVEKSFETDTNLNFQNLSVIGFRILLLKVAGFNLLMTLRLWS

SEQ ID NO: 639 - protein, 311 aa, Homo sapiens
MGPQLLGYVVLCLLGAGPLEAQVTQNPRYLITVTGKKLTVTCSQNMNHEYMSWYRQDPGLGLRQIYYSMNVEVTDKGDVPEGYKVSRKEKRNFPLILESPSPNQTSLYFCASGSRGGPDTQYFGPGTRLTVLEDLKNVFPPEVAVFEPSEAEISHTQKATLVCLATGFYPDHVELSWWVNGKEVHSGVSTDPQPLKEQPALNDSRYCLSSRLRVSATFWQNPRNHFRCQVQFYGLSENDEWTQDRAKPVTQIVSAEAWGRADCGFTSESYQQGVLSATILYEILLGKATLYAVLVSALVLMAMVKRKDSRG

SEQ ID NO: 640 - protein, 272 aa, Homo sapiens
MEKNPLAAPLLILWFHLDCVSSILNVEQSPQSLHVQEGDSTNFTCSFPSSNFYALHWYRWETAKSPEALFVMTLNGDEKKKGRISATLNTKEGYSYLYIKGSQPEDSATYLCASNYGQNFVFGPGTRLSVLPYIQNPDPAVYQLRDSKSSDKSVCLFTDFDSQTNVSQSKDSDVYITDKTVLDMRSMDFKSNSAVAWSNKSDFACANAFNNSIIPEDTFFPSPESSCDVKLVEKSFETDTNLNFQNLSVIGFRILLLKVAGFNLLMTLRLWS

SEQ ID NO: 641 - protein, 310 aa, Homo sapiens
MGFRLLCCVAFCLLGAGPVDSGVTQTPKHLITATGQRVTLRCSPRSGDLSVYWYQQSLDQGLQFLIQYYNGEERAKGNILERFSAQQFPDLHSELNLSSLELGDSALYFCASSVDAWANEKLFFGSGTQLSVLEDLNKVFPPEVAVFEPSEAEISHTQKATLVCLATGFFPDHVELSWWVNGKEVHSGVSTDPQPLKEQPALNDSRYCLSSRLRVSATFWQNPRNHFRCQVQFYGLSENDEWTQDRAKPVTQIVSAEAWGRADCGFTSVSYQQGVLSATILYEILLGKATLYAVLVSALVLMAMVKRKDF

SEQ ID NO: 642 - protein, 269 aa, Homo sapiens
MNYSPGLVSLILLLLGRTRGNSVTQMEGPVTLSEEAFLTINCTYTATGYPSLFWYVQYPGEGLQLLLKATKADDKGSNKGFEATYRKETTSFHLEKGSVQVSDSAVYFCALTGNNDMRFGAGTRLTVKPNIQNPDPAVYQLRDSKSSDKSVCLFTDFDSQTNVSQSKDSDVYITDKTVLDMRSMDFKSNSAVAWSNKSDFACANAFNNSIIPEDTFFPSPESSCDVKLVEKSFETDTNLNFQNLSVIGFRILLLKVAGFNLLMTLRLWS

SEQ ID NO: 643 - protein, 312 aa, Homo sapiens
MGPQLLGYVVLCLLGAGPLEAQVTQNPRYLITVTGKKLTVTCSQNMNHEYMSWYRQDPGLGLRQIYYSMNVEVTDKGDVPEGYKVSRKEKRNFPLILESPSPNQTSLYFCASSLDFPSYNEQFFGPGTRLTVLEDLKNVFPPEVAVFEPSEAEISHTQKATLVCLATGFYPDHVELSWWVNGKEVHSGVSTDPQPLKEQPALNDSRYCLSSRLRVSATFWQNPRNHFRCQVQFYGLSENDEWTQDRAKPVTQIVSAEAWGRADCGFTSESYQQGVLSATILYEILLGKATLYAVLVSALVLMAMVKRKDSRG

SEQ ID NO: 644 - protein, 272 aa, Homo sapiens
MNYSPGLVSLILLLLGRTRGNSVTQMEGPVTLSEEAFLTINCTYTATGYPSLFWYVQYPGEGLQLLLKATKADDKGSNKGFEATYRKETTSFHLEKGSVQVSDSAVYFCASWGSGGYNKLIFGAGTRLAVHPYIQNPDPAVYQLRDSKSSDKSVCLFTDFDSQTNVSQSKDSDVYITDKTVLDMRSMDFKSNSAVAWSNKSDFACANAFNNSIIPEDTFFPSPESSCDVKLVEKSFETDTNLNFQNLSVIGFRILLLKVAGFNLLMTLRLWS

SEQ ID NO: 645 - protein, 311 aa, Homo sapiens
MGIRLLCRVAFCFLAVGLVDVKVTQSSRYLVKRTGEKVFLECVQDMDHENMFWYRQDPGLGLRLIYFSYDVKMKEKGDIPEGYSVSREKKERFSLILESASTNQTSMYLCASGGRDNYNEQFFGPGTRLTVLEDLKNVFPPEVAVFEPSEAEISHTQKATLVCLATGFYPDHVELSWWVNGKEVHSGVSTDPQPLKEQPALNDSRYCLSSRLRVSATFWQNPRNHFRCQVQFYGLSENDEWTQDRAKPVTQIVSAEAWGRADCGFTSESYQQGVLSATILYEILLGKATLYAVLVSALVLMAMVKRKDSRG

SEQ ID NO: 646 - protein, 278 aa, Homo sapiens
MNYSPGLVSLILLLLGRTRGNSVTQMEGPVTLSEEAFLTINCTYTATGYPSLFWYVQYPGEGLQLLLKATKADDKGSNKGFEATYRKETTSFHLEKGSVQVSDSAVYFCALSGSFGNVLHCFGNVLHCGSGTQVIVLPHIQNPDPAVYQLRDSKSSDKSVCLFTDFDSQTNVSQSKDSDVYITDKTVLDMRSMDFKSNSAVAWSNKSDFACANAFNNSIIPEDTFFPSPESSCDVKLVEKSFETDTNLNFQNLSVIGFRILLLKVAGFNLLMTLRLWS

SEQ ID NO: 647 - protein, 314 aa, Homo sapiens
MGIRLLCRVAFCFLAVGLVDVKVTQSSRYLVKRTGEKVFLECVQDMDHENMFWYRQDPGLGLRLIYFSYDVKMKEKGDIPEGYSVSREKKERFSLILESASTNQTSMYLCASSFPALATSYNEQFFGPGTRLTVLEDLKNVFPPEVAVFEPSEAEISHTQKATLVCLATGFYPDHVELSWWVNGKEVHSGVSTDPQPLKEQPALNDSRYCLSSRLRVSATFWQNPRNHFRCQVQFYGLSENDEWTQDRAKPVTQIVSAEAWGRADCGFTSESYQQGVLSATILYEILLGKATLYAVLVSALVLMAMVKRKDSRG

SEQ ID NO: 648 - protein, 274 aa, Homo sapiens
MNYSPGLVSLILLLLGRTRGNSVTQMEGPVTLSEEAFLTINCTYTATGYPSLFWYVQYPGEGLQLLLKATKADDKGSNKGFEATYRKETTSFHLEKGSVQVSDSAVYFCAPYLNSGGSNYKLTFGKGTLLTVNPNIQNPDPAVYQLRDSKSSDKSVCLFTDFDSQTNVSQSKDSDVYITDKTVLDMRSMDFKSNSAVAWSNKSDFACANAFNNSIIPEDTFFPSPESSCDVKLVEKSFETDTNLNFQNLSVIGFRILLLKVAGFNLLMTLRLWS

SEQ ID NO: 649 - protein, 314 aa, Homo sapiens
MGIRLLCRVAFCFLAVGLVDVKVTQSSRYLVKRTGEKVFLECVQDMDHENMFWYRQDPGLGLRLIYFSYDVKMKEKGDIPEGYSVSREKKERFSLILESASTNQTSMYLCASSYPTSGTTYNEQFFGPGTRLTVLEDLKNVFPPEVAVFEPSEAEISHTQKATLVCLATGFYPDHVELSWWVNGKEVHSGVSTDPQPLKEQPALNDSRYCLSSRLRVSATFWQNPRNHFRCQVQFYGLSENDEWTQDRAKPVTQIVSAEAWGRADCGFTSESYQQGVLSATILYEILLGKATLYAVLVSALVLMAMVKRKDSRG

SEQ ID NO: 650 - protein, 273 aa, Homo sapiens
MKPTLISVLVIIFILRGTRAQRVTQPEKLLSVFKGAPVELKCNYSYSGSPELFWYVQYSRQRLQLLLRHISRESIKGFTADLNKGETSFHLKKPFAQEEDSAMYYCALSGGFDSGGGADGLTFGKGTHLIIQPYIQNPDPAVYQLRDSKSSDKSVCLFTDFDSQTNVSQSKDSDVYITDKTVLDMRSMDFKSNSAVAWSNKSDFACANAFNNSIIPEDTFFPSPESSCDVKLVEKSFETDTNLNFQNLSVIGFRILLLKVAGFNLLMTLRLWS

SEQ ID NO: 651 - protein, 311 aa, Homo sapiens
MGPQLLGYVVLCLLGAGPLEAQVTQNPRYLITVTGKKLTVTCSQNMNHEYMSWYRQDPGLGLRQIYYSMNVEVTDKGDVPEGYKVSRKEKRNFPLILESPSPNQTSLYFCASSLSAPLETQYFGPGTRLLVLEDLKNVFPPEVAVFEPSEAEISHTQKATLVCLATGFYPDHVELSWWVNGKEVHSGVSTDPQPLKEQPALNDSRYCLSSRLRVSATFWQNPRNHFRCQVQFYGLSENDEWTQDRAKPVTQIVSAEAWGRADCGFTSESYQQGVLSATILYEILLGKATLYAVLVSALVLMAMVKRKDSRG

SEQ ID NO: 652 - protein, 270 aa, Homo sapiens
MNYSPGLVSLILLLLGRTRGNSVTQMEGPVTLSEEAFLTINCTYTATGYPSLFWYVQYPGEGLQLLLKATKADDKGSNKGFEATYRKETTSFHLEKGSVQVSDSAVYFCALGGTGNQFYFGTGTSLTVIPNIQNPDPAVYQLRDSKSSDKSVCLFTDFDSQTNVSQSKDSDVYITDKTVLDMRSMDFKSNSAVAWSNKSDFACANAFNNSIIPEDTFFPSPESSCDVKLVEKSFETDTNLNFQNLSVIGFRILLLKVAGFNLLMTLRLWS

SEQ ID NO: 653 - protein, 275 aa, Homo sapiens
MLTASLLRAVIASICVVSSMAQKVTQAQTEISVVEKEDVTLDCVYETRDTTYYLFWYKQPPSGELVFLIRRNSFDEQNEISGRYSWNFQKSTSSFNFTITASQVVDSAVYFCALSEGAAGNKLTFGGGTRVLVKPNIQNPDPAVYQLRDSKSSDKSVCLFTDFDSQTNVSQSKDSDVYITDKTVLDMRSMDFKSNSAVAWSNKSDFACANAFNNSIIPEDTFFPSPESSCDVKLVEKSFETDTNLNFQNLSVIGFRILLLKVAGFNLLMTLRLWS

SEQ ID NO: 654 - protein, 311 aa, Homo sapiens
MGPQLLGYVVLCLLGAGPLEAQVTQNPRYLITVTGKKLTVTCSQNMNHEYMSWYRQDPGLGLRQIYYSMNVEVTDKGDVPEGYKVSRKEKRNFPLILESPSPNQTSLYFCASSWRDGTDTQYFGPGTRLTVLEDLKNVFPPEVAVFEPSEAEISHTQKATLVCLATGFYPDHVELSWWVNGKEVHSGVSTDPQPLKEQPALNDSRYCLSSRLRVSATFWQNPRNHFRCQVQFYGLSENDEWTQDRAKPVTQIVSAEAWGRADCGFTSESYQQGVLSATILYEILLGKATLYAVLVSALVLMAMVKRKDSRG

SEQ ID NO: 655 - protein, 272 aa, Homo sapiens
MLLLLVPVLEVIFTLGGTRAQSVTQLDSHVSVSEGTPVLLRCNYSSSYSPSLFWYVQHPNKGLQLLLKYTSAATLVKGINGFEAEFKKSETSFHLTKPSAHMSDAAEYFCVLQSGGSYIPTFGRGTSLIVHPYIQNPDPAVYQLRDSKSSDKSVCLFTDFDSQTNVSQSKDSDVYITDKTVLDMRSMDFKSNSAVAWSNKSDFACANAFNNSIIPEDTFFPSPESSCDVKLVEKSFETDTNLNFQNLSVIGFRILLLKVAGFNLLMTLRLWS

SEQ ID NO: 656 - protein, 311 aa, Homo sapiens
MGFRLLCCVAFCLLGAGPVDSGVTQTPKHLITATGQRVTLRCSPRSGDLSVYWYQQSLDQGLQFLIQYYNGEERAKGNILERFSAQQFPDLHSELNLSSLELGDSALYFCASSVAPDRYEQYFGPGTRLTVTEDLKNVFPPEVAVFEPSEAEISHTQKATLVCLATGFYPDHVELSWWVNGKEVHSGVSTDPQPLKEQPALNDSRYCLSSRLRVSATFWQNPRNHFRCQVQFYGLSENDEWTQDRAKPVTQIVSAEAWGRADCGFTSESYQQGVLSATILYEILLGKATLYAVLVSALVLMAMVKRKDSRG

SEQ ID NO: 657 - protein, 278 aa, Homo sapiens
MLTASLLRAVIASICVVSSMAQKVTQAQTEISVVEKEDVTLDCVYETRDTTYYLFWYKQPPSGELVFLIRRNSFDEQNEISGRYSWNFQKSTSSFNFTITASQVVDSAVYFCALSGWGSYSSASKIIFGSGTRLSIRPNIQNPDPAVYQLRDSKSSDKSVCLFTDFDSQTNVSQSKDSDVYITDKTVLDMRSMDFKSNSAVAWSNKSDFACANAFNNSIIPEDTFFPSPESSCDVKLVEKSFETDTNLNFQNLSVIGFRILLLKVAGFNLLMTLRLWS

SEQ ID NO: 658 - protein, 313 aa, Homo sapiens
MGTRLLCWAALCLLGADHTGAGVSQTPSNKVTEKGKYVELRCDPISGHTALYWYRQSLGQGPEFLIYFQGTGAADDSGLPNDRFFAVRPEGSVSTLKIQRTERGDSAVYLCASSSTDISTDTQYFGPGTRLTVLEDLKNVFPPEVAVFEPSEAEISHTQKATLVCLATGFYPDHVELSWWVNGKEVHSGVSTDPQPLKEQPALNDSRYCLSSRLRVSATFWQNPRNHFRCQVQFYGLSENDEWTQDRAKPVTQIVSAEAWGRADCGFTSESYQQGVLSATILYEILLGKATLYAVLVSALVLMAMVKRKDSRG

SEQ ID NO: 659 - protein, 271 aa, Homo sapiens
MNYSPGLVSLILLLLGRTRGNSVTQMEGPVTLSEEAFLTINCTYTATGYPSLFWYVQYPGEGLQLLLKATKADDKGSNKGFEATYRKETTSFHLEKGSVQVSDSAVYFCALSYNTDKLIFGTGTRLQVFPNIIQNPDPAVYQLRDSKSSDKSVCLFTDFDSQTNVSQSKDSDVYITDKTVLDMRSMDFKSNSAVAWSNKSDFACANAFNNSIIPEDTFFPSPESSCDVKLVEKSFETDTNLNFQNLSVIGFRILLLKVAGFNLLMTLRLWS

SEQ ID NO: 660 - protein, 310 aa, Homo sapiens
MGPQLLGYVVLCLLGAGPLEAQVTQNPRYLITVTGKKLTVTCSQNMNHEYMSWYRQDPGLGLRQIYYSMNVEVTDKGDVPEGYKVSRKEKRNFPLILESPSPNQTSLYFCASRTLGAGELFFGEGSRLTVLEDLKNVFPPEVAVFEPSEAEISHTQKATLVCLATGFYPDHVELSWWVNGKEVHSGVSTDPQPLKEQPALNDSRYCLSSRLRVSATFWQNPRNHFRCQVQFYGLSENDEWTQDRAKPVTQIVSAEAWGRADCGFTSESYQQGVLSATILYEILLGKATLYAVLVSALVLMAMVKRKDSRG

SEQ ID NO: 661 - protein, 272 aa, Homo sapiens
MNYSPGLVSLILLLLGRTRGNSVTQMEGPVTLSEEAFLTINCTYTATGYPSLFWYVQYPGEGLQLLLKATKADDKGSNKGFEATYRKETTSFHLEKGSVQVSDSAVYFCALSGIEGAQKLVFGQGTRLTINPNIQNPDPAVYQLRDSKSSDKSVCLFTDFDSQTNVSQSKDSDVYITDKTVLDMRSMDFKSNSAVAWSNKSDFACANAFNNSIIPEDTFFPSPESSCDVKLVEKSFETDTNLNFQNLSVIGFRILLLKVAGFNLLMTLRLWS

SEQ ID NO: 662 - protein, 314 aa, Homo sapiens
MSIGLLCCAALSLLWAGPVNAGVTQTPKFQVLKTGQSMTLQCAQDMNHEYMSWYRQDPGMGLRLIHYSVGAGITDQGEVPNGYNVSRSTTEDFPLRLLSAAPSQTSVYFCASSYPSRGGTYNEQFFGPGTRLTVLEDLKNVFPPEVAVFEPSEAEISHTQKATLVCLATGFYPDHVELSWWVNGKEVHSGVSTDPQPLKEQPALNDSRYCLSSRLRVSATFWQNPRNHFRCQVQFYGLSENDEWTQDRAKPVTQIVSAEAWGRADCGFTSESYQQGVLSATILYEILLGKATLYAVLVSALVLMAMVKRKDSRG

SEQ ID NO: 663 - protein, 267 aa, Homo sapiens
METLLGLLILWLQLQWVSSKQEVTQIPAALSVPEGENLVLNCSFTDSAIYNLQWFRQDPGKGLTSLLLIQSSQREQTSGRLNASLDKSSGRSTLYIAASQPGDSATYLCAVPGDMRFGAGTRLTVKPNIQNPDPAVYQLRDSKSSDKSVCLFTDFDSQTNVSQSKDSDVYITDKTVLDMRSMDFKSNSAVAWSNKSDFACANAFNNSIIPEDTFFPSPESSCDVKLVEKSFETDTNLNFQNLSVIGFRILLLKVAGFNLLMTLRLWS

SEQ ID NO: 664 - protein, 312 aa, Homo sapiens
MGPQLLGYVVLCLLGAGPLEAQVTQNPRYLITVTGKKLTVTCSQNMNHEYMSWYRQDPGLGLRQIYYSMNVEVTDKGDVPEGYKVSRKEKRNFPLILESPSPNQTSLYFCASSPSDPHYNEQFFGPGTRLTVLEDLKNVFPPEVAVFEPSEAEISHTQKATLVCLATGFYPDHVELSWWVNGKEVHSGVSTDPQPLKEQPALNDSRYCLSSRLRVSATFWQNPRNHFRCQVQFYGLSENDEWTQDRAKPVTQIVSAEAWGRADCGFTSESYQQGVLSATILYEILLGKATLYAVLVSALVLMAMVKRKDSRG

SEQ ID NO: 665 - protein, 269 aa, Homo sapiens
MRQVARVIVFLTLSTLSLAKTTQPISMDSYEGQEVNITCSHNNIATNDYITWYQQFPSQGPRFIIQGYKTKVTNEVASLFIPADRKSSTLSLPRVSLSDTAVYYCLVGPNSGGYQKVTFGIGTKLQVIPNIQNPDPAVYQLRDSKSSDKSVCLFTDFDSQTNVSQSKDSDVYITDKTVLDMRSMDFKSNSAVAWSNKSDFACANAFNNSIIPEDTFFPSPESSCDVKLVEKSFETDTNLNFQNLSVIGFRILLLKVAGFNLLMTLRLWS

SEQ ID NO: 666 - protein, 308 aa, Homo sapiens
MGPQLLGYVVLCLLGAGPLEAQVTQNPRYLITVTGKKLTVTCSQNMNHEYMSWYRQDPGLGLRQIYYSMNVEVTDKGDVPEGYKVSRKEKRNFPLILESPSPNQTSLYFCASRPTGNAEAFFGQGTRLTVVEDLNKVFPPEVAVFEPSEAEISHTQKATLVCLATGFFPDHVELSWWVNGKEVHSGVSTDPQPLKEQPALNDSRYCLSSRLRVSATFWQNPRNHFRCQVQFYGLSENDEWTQDRAKPVTQIVSAEAWGRADCGFTSVSYQQGVLSATILYEILLGKATLYAVLVSALVLMAMVKRKDF

SEQ ID NO: 667 - protein, 270 aa, Homo sapiens
MNYSPGLVSLILLLLGRTRGNSVTQMEGPVTLSEEAFLTINCTYTATGYPSLFWYVQYPGEGLQLLLKATKADDKGSNKGFEATYRKETTSFHLEKGSVQVSDSAVYFCALMGSGNQFYFGTGTSLTVIPNIQNPDPAVYQLRDSKSSDKSVCLFTDFDSQTNVSQSKDSDVYITDKTVLDMRSMDFKSNSAVAWSNKSDFACANAFNNSIIPEDTFFPSPESSCDVKLVEKSFETDTNLNFQNLSVIGFRILLLKVAGFNLLMTLRLWS

SEQ ID NO: 668 - protein, 309 aa, Homo sapiens
MGPQLLGYVVLCLLGAGPLEAQVTQNPRYLITVTGKKLTVTCSQNMNHEYMSWYRQDPGLGLRQIYYSMNVEVTDKGDVPEGYKVSRKEKRNFPLILESPSPNQTSLYFCASSPRGHEQYFGPGTRLTVTEDLKNVFPPEVAVFEPSEAEISHTQKATLVCLATGFYPDHVELSWWVNGKEVHSGVSTDPQPLKEQPALNDSRYCLSSRLRVSATFWQNPRNHFRCQVQFYGLSENDEWTQDRAKPVTQIVSAEAWGRADCGFTSESYQQGVLSATILYEILLGKATLYAVLVSALVLMAMVKRKDSRG

SEQ ID NO: 669 - protein, 275 aa, Homo sapiens
MMKSLRVLLVILWLQLSWVWSQQKEVEQDPGPLSVPEGAIVSLNCTYSNSAFQYFMWYRQYSRKGPELLMYTYSSGNKEDGRFTAQVDKSSKYISLFIRDSQPSDSATYLCAMSAGSGGYQKVTFGIGTKLQVIPNIQNPDPAVYQLRDSKSSDKSVCLFTDFDSQTNVSQSKDSDVYITDKTVLDMRSMDFKSNSAVAWSNKSDFACANAFNNSIIPEDTFFPSPESSCDVKLVEKSFETDTNLNFQNLSVIGFRILLLKVAGFNLLMTLRLWS

SEQ ID NO: 670 - protein, 310 aa, Homo sapiens
MGCRLLCCVVFCLLQAGPLDTAVSQTPKYLVTQMGNDKSIKCEQNLGHDTMYWYKQDSKKFLKIMFSYNNKELIINETVPNRFSPKSPDKAHLNLHINSLELGDSAVYFCASSQEPDRTYGYTFGSGTRLTVVEDLNKVFPPEVAVFEPSEAEISHTQKATLVCLATGFFPDHVELSWWVNGKEVHSGVSTDPQPLKEQPALNDSRYCLSSRLRVSATFWQNPRNHFRCQVQFYGLSENDEWTQDRAKPVTQIVSAEAWGRADCGFTSVSYQQGVLSATILYEILLGKATLYAVLVSALVLMAMVKRKDF

SEQ ID NO: 671 - protein, 270 aa, Homo sapiens
MNYSPGLVSLILLLLGRTRGNSVTQMEGPVTLSEEAFLTINCTYTATGYPSLFWYVQYPGEGLQLLLKATKADDKGSNKGFEATYRKETTSFHLEKGSVQVSDSAVYFCALSVNAGKSTFGDGTTLTVKPNIQNPDPAVYQLRDSKSSDKSVCLFTDFDSQTNVSQSKDSDVYITDKTVLDMRSMDFKSNSAVAWSNKSDFACANAFNNSIIPEDTFFPSPESSCDVKLVEKSFETDTNLNFQNLSVIGFRILLLKVAGFNLLMTLRLWS

SEQ ID NO: 672 - protein, 312 aa, Homo sapiens
MGIRLLCRVAFCFLAVGLVDVKVTQSSRYLVKRTGEKVFLECVQDMDHENMFWYRQDPGLGLRLIYFSYDVKMKEKGDIPEGYSVSREKKERFSLILESASTNQTSMYLCASSETSGPYNEQFFGPGTRLTVLEDLKNVFPPEVAVFEPSEAEISHTQKATLVCLATGFYPDHVELSWWVNGKEVHSGVSTDPQPLKEQPALNDSRYCLSSRLRVSATFWQNPRNHFRCQVQFYGLSENDEWTQDRAKPVTQIVSAEAWGRADCGFTSESYQQGVLSATILYEILLGKATLYAVLVSALVLMAMVKRKDSRG

SEQ ID NO: 673 - protein, 271 aa, Homo sapiens
MNYSPGLVSLILLLLGRTRGNSVTQMEGPVTLSEEAFLTINCTYTATGYPSLFWYVQYPGEGLQLLLKATKADDKGSNKGFEATYRKETTSFHLEKGSVQVSDSAVYFCALSGNTDKLIFGTGTRLQVFPNIIQNPDPAVYQLRDSKSSDKSVCLFTDFDSQTNVSQSKDSDVYITDKTVLDMRSMDFKSNSAVAWSNKSDFACANAFNNSIIPEDTFFPSPESSCDVKLVEKSFETDTNLNFQNLSVIGFRILLLKVAGFNLLMTLRLWS

SEQ ID NO: 674 - protein, 312 aa, Homo sapiens
MGIRLLCRVAFCFLAVGLVDVKVTQSSRYLVKRTGEKVFLECVQDMDHENMFWYRQDPGLGLRLIYFSYDVKMKEKGDIPEGYSVSREKKERFSLILESASTNQTSMYLCASSRATGVVYEQYFGPGTRLTVTEDLKNVFPPEVAVFEPSEAEISHTQKATLVCLATGFYPDHVELSWWVNGKEVHSGVSTDPQPLKEQPALNDSRYCLSSRLRVSATFWQNPRNHFRCQVQFYGLSENDEWTQDRAKPVTQIVSAEAWGRADCGFTSESYQQGVLSATILYEILLGKATLYAVLVSALVLMAMVKRKDSRG

SEQ ID NO: 675 - protein, 265 aa, Homo sapiens
MWGAFLLYVSMKMGGTAGQSLEQPSEVTAVEGAIVQINCTYQTSGFYGLSWYQQHDGGAPTFLSYNALDGLEETGRFSSFLSRSDSYGYLLLQELQMKDSASYFCAVRSARQLTFGSGTQLTVLPDIQNPDPAVYQLRDSKSSDKSVCLFTDFDSQTNVSQSKDSDVYITDKTVLDMRSMDFKSNSAVAWSNKSDFACANAFNNSIIPEDTFFPSPESSCDVKLVEKSFETDTNLNFQNLSVIGFRILLLKVAGFNLLMTLRLWS

SEQ ID NO: 676 - protein, 312 aa, Homo sapiens
MSIGLLCCAALSLLWAGPVNAGVTQTPKFQVLKTGQSMTLQCAQDMNHEYMSWYRQDPGMGLRLIHYSVGAGITDQGEVPNGYNVSRSTTEDFPLRLLSAAPSQTSVYFCASSSQGLGTYEQYFGPGTRLTVTEDLKNVFPPEVAVFEPSEAEISHTQKATLVCLATGFYPDHVELSWWVNGKEVHSGVSTDPQPLKEQPALNDSRYCLSSRLRVSATFWQNPRNHFRCQVQFYGLSENDEWTQDRAKPVTQIVSAEAWGRADCGFTSESYQQGVLSATILYEILLGKATLYAVLVSALVLMAMVKRKDSRG

SEQ ID NO: 677 - protein, 274 aa, Homo sapiens
MESFLGGVLLILWLQVDWVKSQKIEQNSEALNIQEGKTATLTCNYTNYSPAYLQWYRQDPGRGPVFLLLIRENEKEKRKERLKVTFDTTLKQSLFHITASQPADSATYLCALVVNTGTASKLTFGTGTRLQVTLDIQNPDPAVYQLRDSKSSDKSVCLFTDFDSQTNVSQSKDSDVYITDKTVLDMRSMDFKSNSAVAWSNKSDFACANAFNNSIIPEDTFFPSPESSCDVKLVEKSFETDTNLNFQNLSVIGFRILLLKVAGFNLLMTLRLWS

SEQ ID NO: 678 - protein, 314 aa, Homo sapiens
MGIRLLCRVAFCFLAVGLVDVKVTQSSRYLVKRTGEKVFLECVQDMDHENMFWYRQDPGLGLRLIYFSYDVKMKEKGDIPEGYSVSREKKERFSLILESASTNQTSMYLCASSLGSGGSSVETQYFGPGTRLLVLEDLKNVFPPEVAVFEPSEAEISHTQKATLVCLATGFYPDHVELSWWVNGKEVHSGVSTDPQPLKEQPALNDSRYCLSSRLRVSATFWQNPRNHFRCQVQFYGLSENDEWTQDRAKPVTQIVSAEAWGRADCGFTSESYQQGVLSATILYEILLGKATLYAVLVSALVLMAMVKRKDSRG

SEQ ID NO: 679 - protein, 273 aa, Homo sapiens
METVLQVLLGILGFQAAWVSSQELEQSPQSLIVQEGKNLTINCTSSKTLYGLYWYKQKYGEGLIFLMMLQKGGEEKSHEKITAKLDEKKQQSSLHITASQPSHAGIYLCGASLIYNFNKFYFGSGTKLNVKPNIIQNPDPAVYQLRDSKSSDKSVCLFTDFDSQTNVSQSKDSDVYITDKTVLDMRSMDFKSNSAVAWSNKSDFACANAFNNSIIPEDTFFPSPESSCDVKLVEKSFETDTNLNFQNLSVIGFRILLLKVAGFNLLMTLRLWS

SEQ ID NO: 680 - protein, 304 aa, Homo sapiens
MLCSLLALLLGTFFGVRSQTIHQWPATLVQPVGSPLSLECTVEGTSNPNLYWYRQAAGRGLQLLFYSVGIGQISSEVPQNLSASRPQDRQFILSSKKLLLSDSGFYLCAWVRGTEAFFGQGTRLTVVEDLNKVFPPEVAVFEPSEAEISHTQKATLVCLATGFFPDHVELSWWVNGKEVHSGVSTDPQPLKEQPALNDSRYCLSSRLRVSATFWQNPRNHFRCQVQFYGLSENDEWTQDRAKPVTQIVSAEAWGRADCGFTSVSYQQGVLSATILYEILLGKATLYAVLVSALVLMAMVKRKDF

SEQ ID NO: 681 - protein, 271 aa, Homo sapiens
MNYSPGLVSLILLLLGRTRGNSVTQMEGPVTLSEEAFLTINCTYTATGYPSLFWYVQYPGEGLQLLLKATKADDKGSNKGFEATYRKETTSFHLEKGSVQVSDSAVYFCALSGPGGELIFGTGTRLQVFPNIIQNPDPAVYQLRDSKSSDKSVCLFTDFDSQTNVSQSKDSDVYITDKTVLDMRSMDFKSNSAVAWSNKSDFACANAFNNSIIPEDTFFPSPESSCDVKLVEKSFETDTNLNFQNLSVIGFRILLLKVAGFNLLMTLRLWS

SEQ ID NO: 682 - protein, 309 aa, Homo sapiens
MGPQLLGYVVLCLLGAGPLEAQVTQNPRYLITVTGKKLTVTCSQNMNHEYMSWYRQDPGLGLRQIYYSMNVEVTDKGDVPEGYKVSRKEKRNFPLILESPSPNQTSLYFCASSHRGPNEKLFFGSGTQLSVLEDLNKVFPPEVAVFEPSEAEISHTQKATLVCLATGFFPDHVELSWWVNGKEVHSGVSTDPQPLKEQPALNDSRYCLSSRLRVSATFWQNPRNHFRCQVQFYGLSENDEWTQDRAKPVTQIVSAEAWGRADCGFTSVSYQQGVLSATILYEILLGKATLYAVLVSALVLMAMVKRKDF

SEQ ID NO: 683 - protein, 270 aa, Homo sapiens
MNYSPGLVSLILLLLGRTRGNSVTQMEGPVTLSEEAFLTINCTYTATGYPSLFWYVQYPGEGLQLLLKATKADDKGSNKGFEATYRKETTSFHLEKGSVQVSDSAVYFCALSDAGNQFYFGTGTSLTVIPNIQNPDPAVYQLRDSKSSDKSVCLFTDFDSQTNVSQSKDSDVYITDKTVLDMRSMDFKSNSAVAWSNKSDFACANAFNNSIIPEDTFFPSPESSCDVKLVEKSFETDTNLNFQNLSVIGFRILLLKVAGFNLLMTLRLWS

SEQ ID NO: 684 - protein, 309 aa, Homo sapiens
MSIGLLCCAALSLLWAGPVNAGVTQTPKFQVLKTGQSMTLQCAQDMNHEYMSWYRQDPGMGLRLIHYSVGAGITDQGEVPNGYNVSRSTTEDFPLRLLSAAPSQTSVYFCASSTGDFGYGYTFGSGTRLTVVEDLNKVFPPEVAVFEPSEAEISHTQKATLVCLATGFFPDHVELSWWVNGKEVHSGVSTDPQPLKEQPALNDSRYCLSSRLRVSATFWQNPRNHFRCQVQFYGLSENDEWTQDRAKPVTQIVSAEAWGRADCGFTSVSYQQGVLSATILYEILLGKATLYAVLVSALVLMAMVKRKDF

SEQ ID NO: 685 - protein, 272 aa, Homo sapiens
METVLQVLLGILGFQAAWVSSQELEQSPQSLIVQEGKNLTINCTSSKTLYGLYWYKQKYGEGLIFLMMLQKGGEEKSHEKITAKLDEKKQQSSLHITASQPSHAGIYLCGALSNFGNEKLTFGTGTRLTIIPNIQNPDPAVYQLRDSKSSDKSVCLFTDFDSQTNVSQSKDSDVYITDKTVLDMRSMDFKSNSAVAWSNKSDFACANAFNNSIIPEDTFFPSPESSCDVKLVEKSFETDTNLNFQNLSVIGFRILLLKVAGFNLLMTLRLWS

SEQ ID NO: 686 - protein, 311 aa, Homo sapiens
MGCRLLCCAVLCLLGAVPIDTEVTQTPKHLVMGMTNKKSLKCEQHMGHRAMYWYKQKAKKPPELMFVYSYEKLSINESVPSRFSPECPNSSLLNLHLHALQPEDSALYLCASSQDRWGTNEKLFFGSGTQLSVLEDLNKVFPPEVAVFEPSEAEISHTQKATLVCLATGFFPDHVELSWWVNGKEVHSGVSTDPQPLKEQPALNDSRYCLSSRLRVSATFWQNPRNHFRCQVQFYGLSENDEWTQDRAKPVTQIVSAEAWGRADCGFTSVSYQQGVLSATILYEILLGKATLYAVLVSALVLMAMVKRKDF

SEQ ID NO: 687 - protein, 267 aa, Homo sapiens
MWGVFLLYVSMKMGGTTGQNIDQPTEMTATEGAIVQINCTYQTSGFNGLFWYQQHAGEAPTFLSYNVLDGLEEKGRFSSFLSRSKGYSYLLLKELQMKDSASYLCAVASGGYNKLIFGAGTRLAVHPYIQNPDPAVYQLRDSKSSDKSVCLFTDFDSQTNVSQSKDSDVYITDKTVLDMRSMDFKSNSAVAWSNKSDFACANAFNNSIIPEDTFFPSPESSCDVKLVEKSFETDTNLNFQNLSVIGFRILLLKVAGFNLLMTLRLWS

SEQ ID NO: 688 - protein, 311 aa, Homo sapiens
MGCRLLCCVVFCLLQAGPLDTAVSQTPKYLVTQMGNDKSIKCEQNLGHDTMYWYKQDSKKFLKIMFSYNNKELIINETVPNRFSPKSPDKAHLNLHINSLELGDSAVYFCASSQDQGQSIYGYTFGSGTRLTVVEDLNKVFPPEVAVFEPSEAEISHTQKATLVCLATGFFPDHVELSWWVNGKEVHSGVSTDPQPLKEQPALNDSRYCLSSRLRVSATFWQNPRNHFRCQVQFYGLSENDEWTQDRAKPVTQIVSAEAWGRADCGFTSVSYQQGVLSATILYEILLGKATLYAVLVSALVLMAMVKRKDF

SEQ ID NO: 689 - protein, 278 aa, Homo sapiens
MAMLLGASVLILWLQPDWVNSQQKNDDQQVKQNSPSLSVQEGRISILNCDYTNSMFDYFLWYKKYPAEGPTFLISISSIKDKNEDGRFTVFLNKSAKHLSLHIVPSQPGDSAVYFCAALTGTASKLTFGTGTRLQVTLDIQNPDPAVYQLRDSKSSDKSVCLFTDFDSQTNVSQSKDSDVYITDKTVLDMRSMDFKSNSAVAWSNKSDFACANAFNNSIIPEDTFFPSPESSCDVKLVEKSFETDTNLNFQNLSVIGFRILLLKVAGFNLLMTLRLWS

SEQ ID NO: 690 - protein, 315 aa, Homo sapiens
MGTRLLCWAALCLLGAELTEAGVAQSPRYKIIEKRQSVAFWCNPISGHATLYWYQQILGQGPKLLIQFQNNGVVDDSQLPKDRFSAERLKGVDSTLKIQPAKLEDSAVYLCASSLDAGGFPTDTQYFGPGTRLTVLEDLKNVFPPEVAVFEPSEAEISHTQKATLVCLATGFYPDHVELSWWVNGKEVHSGVSTDPQPLKEQPALNDSRYCLSSRLRVSATFWQNPRNHFRCQVQFYGLSENDEWTQDRAKPVTQIVSAEAWGRADCGFTSESYQQGVLSATILYEILLGKATLYAVLVSALVLMAMVKRKDSRG

SEQ ID NO: 691 - protein, 270 aa, Homo sapiens
MNYSPGLVSLILLLLGRTRGNSVTQMEGPVTLSEEAFLTINCTYTATGYPSLFWYVQYPGEGLQLLLKATKADDKGSNKGFEATYRKETTSFHLEKGSVQVSDSAVYFCGYGGSQGNLIFGKGTKLSVKPNIQNPDPAVYQLRDSKSSDKSVCLFTDFDSQTNVSQSKDSDVYITDKTVLDMRSMDFKSNSAVAWSNKSDFACANAFNNSIIPEDTFFPSPESSCDVKLVEKSFETDTNLNFQNLSVIGFRILLLKVAGFNLLMTLRLWS

SEQ ID NO: 692 - protein, 311 aa, Homo sapiens
MGPQLLGYVVLCLLGAGPLEAQVTQNPRYLITVTGKKLTVTCSQNMNHEYMSWYRQDPGLGLRQIYYSMNVEVTDKGDVPEGYKVSRKEKRNFPLILESPSPNQTSLYFCASSFRSGSDTQYFGPGTRLTVLEDLKNVFPPEVAVFEPSEAEISHTQKATLVCLATGFYPDHVELSWWVNGKEVHSGVSTDPQPLKEQPALNDSRYCLSSRLRVSATFWQNPRNHFRCQVQFYGLSENDEWTQDRAKPVTQIVSAEAWGRADCGFTSESYQQGVLSATILYEILLGKATLYAVLVSALVLMAMVKRKDSRG

SEQ ID NO: 693 - protein, 269 aa, Homo sapiens
MNYSPGLVSLILLLLGRTRGNSVTQMEGPVTLSEEAFLTINCTYTATGYPSLFWYVQYPGEGLQLLLKATKADDKGSNKGFEATYRKETTSFHLEKGSVQVSDSAVYFCALSSLNDMRFGAGTRLTVKPNIQNPDPAVYQLRDSKSSDKSVCLFTDFDSQTNVSQSKDSDVYITDKTVLDMRSMDFKSNSAVAWSNKSDFACANAFNNSIIPEDTFFPSPESSCDVKLVEKSFETDTNLNFQNLSVIGFRILLLKVAGFNLLMTLRLWS

SEQ ID NO: 694 - protein, 311 aa, Homo sapiens
MGPQLLGYVVLCLLGAGPLEAQVTQNPRYLITVTGKKLTVTCSQNMNHEYMSWYRQDPGLGLRQIYYSMNVEVTDKGDVPEGYKVSRKEKRNFPLILESPSPNQTSLYFCASAQGGGPDTQYFGPGTRLTVLEDLKNVFPPEVAVFEPSEAEISHTQKATLVCLATGFYPDHVELSWWVNGKEVHSGVSTDPQPLKEQPALNDSRYCLSSRLRVSATFWQNPRNHFRCQVQFYGLSENDEWTQDRAKPVTQIVSAEAWGRADCGFTSESYQQGVLSATILYEILLGKATLYAVLVSALVLMAMVKRKDSRG

SEQ ID NO: 695 - protein, 269 aa, Homo sapiens
MNYSPGLVSLILLLLGRTRGNSVTQMEGPVTLSEEAFLTINCTYTATGYPSLFWYVQYPGEGLQLLLKATKADDKGSNKGFEATYRKETTSFHLEKGSVQVSDSAVYFCALSGGNQFYFGTGTSLTVIPNIQNPDPAVYQLRDSKSSDKSVCLFTDFDSQTNVSQSKDSDVYITDKTVLDMRSMDFKSNSAVAWSNKSDFACANAFNNSIIPEDTFFPSPESSCDVKLVEKSFETDTNLNFQNLSVIGFRILLLKVAGFNLLMTLRLWS

SEQ ID NO: 696 - protein, 312 aa, Homo sapiens
MGPQLLGYVVLCLLGAGPLEAQVTQNPRYLITVTGKKLTVTCSQNMNHEYMSWYRQDPGLGLRQIYYSMNVEVTDKGDVPEGYKVSRKEKRNFPLILESPSPNQTSLYFCASSYRDSDTDTQYFGPGTRLTVLEDLKNVFPPEVAVFEPSEAEISHTQKATLVCLATGFYPDHVELSWWVNGKEVHSGVSTDPQPLKEQPALNDSRYCLSSRLRVSATFWQNPRNHFRCQVQFYGLSENDEWTQDRAKPVTQIVSAEAWGRADCGFTSESYQQGVLSATILYEILLGKATLYAVLVSALVLMAMVKRKDSRG

SEQ ID NO: 697 - protein, 268 aa, Homo sapiens
MLLEHLLIILWMQLTWVSGQQLNQSPQSMFIQEGEDVSMNCTSSSIFNTWLWYKQEPGEGPVLLIALYKAGELTSNGRLTAQFGITRKDSFLNISASIPSDVGIYFCAGQPLGNQFYFGTGTSLTVIPNIQNPDPAVYQLRDSKSSDKSVCLFTDFDSQTNVSQSKDSDVYITDKTVLDMRSMDFKSNSAVAWSNKSDFACANAFNNSIIPEDTFFPSPESSCDVKLVEKSFETDTNLNFQNLSVIGFRILLLKVAGFNLLMTLRLWS

SEQ ID NO: 698 - protein, 311 aa, Homo sapiens
MGPQLLGYVVLCLLGAGPLEAQVTQNPRYLITVTGKKLTVTCSQNMNHEYMSWYRQDPGLGLRQIYYSMNVEVTDKGDVPEGYKVSRKEKRNFPLILESPSPNQTSLYFCASSQRDSTYEQYFGPGTRLTVTEDLKNVFPPEVAVFEPSEAEISHTQKATLVCLATGFYPDHVELSWWVNGKEVHSGVSTDPQPLKEQPALNDSRYCLSSRLRVSATFWQNPRNHFRCQVQFYGLSENDEWTQDRAKPVTQIVSAEAWGRADCGFTSESYQQGVLSATILYEILLGKATLYAVLVSALVLMAMVKRKDSRG

SEQ ID NO: 699 - protein, 272 aa, Homo sapiens
MNYSPGLVSLILLLLGRTRGNSVTQMEGPVTLSEEAFLTINCTYTATGYPSLFWYVQYPGEGLQLLLKATKADDKGSNKGFEATYRKETTSFHLEKGSVQVSDSAVYFCALSGIQGAQKLVFGQGTRLTINPNIQNPDPAVYQLRDSKSSDKSVCLFTDFDSQTNVSQSKDSDVYITDKTVLDMRSMDFKSNSAVAWSNKSDFACANAFNNSIIPEDTFFPSPESSCDVKLVEKSFETDTNLNFQNLSVIGFRILLLKVAGFNLLMTLRLWS

SEQ ID NO: 700 - protein, 314 aa, Homo sapiens
MSIGLLCCAALSLLWAGPVNAGVTQTPKFQVLKTGQSMTLQCAQDMNHEYMSWYRQDPGMGLRLIHYSVGAGITDQGEVPNGYNVSRSTTEDFPLRLLSAAPSQTSVYFCASSYPPQGTSYNEQFFGPGTRLTVLEDLKNVFPPEVAVFEPSEAEISHTQKATLVCLATGFYPDHVELSWWVNGKEVHSGVSTDPQPLKEQPALNDSRYCLSSRLRVSATFWQNPRNHFRCQVQFYGLSENDEWTQDRAKPVTQIVSAEAWGRADCGFTSESYQQGVLSATILYEILLGKATLYAVLVSALVLMAMVKRKDSRG

SEQ ID NO: 701 - protein, 270 aa, Homo sapiens
MNYSPGLVSLILLLLGRTRGNSVTQMEGPVTLSEEAFLTINCTYTATGYPSLFWYVQYPGEGLQLLLKATKADDKGSNKGFEATYRKETTSFHLEKGSVQVSDSAVYFCASGGSQGNLIFGKGTKLSVKPNIQNPDPAVYQLRDSKSSDKSVCLFTDFDSQTNVSQSKDSDVYITDKTVLDMRSMDFKSNSAVAWSNKSDFACANAFNNSIIPEDTFFPSPESSCDVKLVEKSFETDTNLNFQNLSVIGFRILLLKVAGFNLLMTLRLWS

SEQ ID NO: 702 - protein, 311 aa, Homo sapiens
MGPQLLGYVVLCLLGAGPLEAQVTQNPRYLITVTGKKLTVTCSQNMNHEYMSWYRQDPGLGLRQIYYSMNVEVTDKGDVPEGYKVSRKEKRNFPLILESPSPNQTSLYFCASSERAGTDTQYFGPGTRLTVLEDLKNVFPPEVAVFEPSEAEISHTQKATLVCLATGFYPDHVELSWWVNGKEVHSGVSTDPQPLKEQPALNDSRYCLSSRLRVSATFWQNPRNHFRCQVQFYGLSENDEWTQDRAKPVTQIVSAEAWGRADCGFTSESYQQGVLSATILYEILLGKATLYAVLVSALVLMAMVKRKDSRG

SEQ ID NO: 703 - protein, 275 aa, Homo sapiens
MSLSSLLKVVTASLWLGPGIAQKITQTQPGMFVQEKEAVTLDCTYDTSDPSYGLFWYKQPSSGEMIFLIYQGSYDQQNATEGRYSLNFQKARKSANLVISASQLGDSAMYFCAMRDMNRDDKIIFGKGTRLHILPNIQNPDPAVYQLRDSKSSDKSVCLFTDFDSQTNVSQSKDSDVYITDKTVLDMRSMDFKSNSAVAWSNKSDFACANAFNNSIIPEDTFFPSPESSCDVKLVEKSFETDTNLNFQNLSVIGFRILLLKVAGFNLLMTLRLWS

SEQ ID NO: 704 - protein, 311 aa, Homo sapiens
MGPQLLGYVVLCLLGAGPLEAQVTQNPRYLITVTGKKLTVTCSQNMNHEYMSWYRQDPGLGLRQIYYSMNVEVTDKGDVPEGYKVSRKEKRNFPLILESPSPNQTSLYFCASSSTDSSDTQYFGPGTRLTVLEDLKNVFPPEVAVFEPSEAEISHTQKATLVCLATGFYPDHVELSWWVNGKEVHSGVSTDPQPLKEQPALNDSRYCLSSRLRVSATFWQNPRNHFRCQVQFYGLSENDEWTQDRAKPVTQIVSAEAWGRADCGFTSESYQQGVLSATILYEILLGKATLYAVLVSALVLMAMVKRKDSRG

SEQ ID NO: 705 - protein, 272 aa, Homo sapiens
METLLKVLSGTLLWQLTWVRSQQPVQSPQAVILREGEDAVINCSSSKALYSVHWYRQKHGEAPVFLMILLKGGEQKGHEKISASFNEKKQQSSLYLTASQLSYSGTYFCGTTNEGSQGNLIFGKGTKLSVKPNIQNPDPAVYQLRDSKSSDKSVCLFTDFDSQTNVSQSKDSDVYITDKTVLDMRSMDFKSNSAVAWSNKSDFACANAFNNSIIPEDTFFPSPESSCDVKLVEKSFETDTNLNFQNLSVIGFRILLLKVAGFNLLMTLRLWS

SEQ ID NO: 706 - protein, 312 aa, Homo sapiens
MGTRLLCWVVLGFLGTDHTGAGVSQSPRYKVAKRGQDVALRCDPISGHVSLFWYQQALGQGPEFLTYFQNEAQLDKSGLPSDRFFAERPEGSVSTLKIQRTQQEDSAVYLCASSLGGLRRNTEAFFGQGTRLTVVEDLNKVFPPEVAVFEPSEAEISHTQKATLVCLATGFFPDHVELSWWVNGKEVHSGVSTDPQPLKEQPALNDSRYCLSSRLRVSATFWQNPRNHFRCQVQFYGLSENDEWTQDRAKPVTQIVSAEAWGRADCGFTSVSYQQGVLSATILYEILLGKATLYAVLVSALVLMAMVKRKDF

SEQ ID NO: 707 - protein, 280 aa, Homo sapiens
MLLLLVPAFQVIFTLGGTRAQSVTQLDSQVPVFEEAPVELRCNYSSSVSVYLFWYVQYPNQGLQLLLKYLSGSTLVESINGFEAEFNKSQTSFHLRKPSVHISDTAEYFCAVSEPGFGNVLHCFGNVLHCGSGTQVIVLPHIQNPDPAVYQLRDSKSSDKSVCLFTDFDSQTNVSQSKDSDVYITDKTVLDMRSMDFKSNSAVAWSNKSDFACANAFNNSIIPEDTFFPSPESSCDVKLVEKSFETDTNLNFQNLSVIGFRILLLKVAGFNLLMTLRLWS

SEQ ID NO: 708 - protein, 270 aa, Homo sapiens
MESFLGGVLLILWLQVDWVKSQKIEQNSEALNIQEGKTATLTCNYTNYSPAYLQWYRQDPGRGPVFLLLIRENEKEKRKERLKVTFDTTLKQSLFHITASQPADSATYLCALVMGNQFYFGTGTSLTVIPNIQNPDPAVYQLRDSKSSDKSVCLFTDFDSQTNVSQSKDSDVYITDKTVLDMRSMDFKSNSAVAWSNKSDFACANAFNNSIIPEDTFFPSPESSCDVKLVEKSFETDTNLNFQNLSVIGFRILLLKVAGFNLLMTLRLWS

SEQ ID NO: 709 - protein, 309 aa, Homo sapiens
MSLGLLCCGAFSLLWAGPVNAGVTQTPKFRVLKTGQSMTLLCAQDMNHEYMYWYRQDPGMGLRLIHYSVGEGTTAKGEVPDGYNVSRLKKQNFLLGLESAAPSQTSVYFCASSYGYSNQPQHFGDGTRLSILEDLNKVFPPEVAVFEPSEAEISHTQKATLVCLATGFFPDHVELSWWVNGKEVHSGVSTDPQPLKEQPALNDSRYCLSSRLRVSATFWQNPRNHFRCQVQFYGLSENDEWTQDRAKPVTQIVSAEAWGRADCGFTSVSYQQGVLSATILYEILLGKATLYAVLVSALVLMAMVKRKDF

SEQ ID NO: 710 - protein, 271 aa, Homo sapiens
MNYSPGLVSLILLLLGRTRGNSVTQMEGPVTLSEEAFLTINCTYTATGYPSLFWYVQYPGEGLQLLLKATKADDKGSNKGFEATYRKETTSFHLEKGSVQVSDSAVYFCALSGAAGNKLTFGGGTRVLVKPNIQNPDPAVYQLRDSKSSDKSVCLFTDFDSQTNVSQSKDSDVYITDKTVLDMRSMDFKSNSAVAWSNKSDFACANAFNNSIIPEDTFFPSPESSCDVKLVEKSFETDTNLNFQNLSVIGFRILLLKVAGFNLLMTLRLWS

SEQ ID NO: 711 - protein, 314 aa, Homo sapiens
MGIRLLCRVAFCFLAVGLVDVKVTQSSRYLVKRTGEKVFLECVQDMDHENMFWYRQDPGLGLRLIYFSYDVKMKEKGDIPEGYSVSREKKERFSLILESASTNQTSMYLCASSYPSAGVSYNEQFFGPGTRLTVLEDLKNVFPPEVAVFEPSEAEISHTQKATLVCLATGFYPDHVELSWWVNGKEVHSGVSTDPQPLKEQPALNDSRYCLSSRLRVSATFWQNPRNHFRCQVQFYGLSENDEWTQDRAKPVTQIVSAEAWGRADCGFTSESYQQGVLSATILYEILLGKATLYAVLVSALVLMAMVKRKDSRG

SEQ ID NO: 712 - protein, 270 aa, Homo sapiens
METLLGLLILWLQLQWVSSKQEVTQIPAALSVPEGENLVLNCSFTDSAIYNLQWFRQDPGKGLTSLLLIQSSQREQTSGRLNASLDKSSGRSTLYIAASQPGDSATYLCAVRQRDDKIIFGKGTRLHILPNIQNPDPAVYQLRDSKSSDKSVCLFTDFDSQTNVSQSKDSDVYITDKTVLDMRSMDFKSNSAVAWSNKSDFACANAFNNSIIPEDTFFPSPESSCDVKLVEKSFETDTNLNFQNLSVIGFRILLLKVAGFNLLMTLRLWS

SEQ ID NO: 713 - protein, 311 aa, Homo sapiens
MGPRLLFWALLCLLGTGPVEAGVTQSPTHLIKTRGQQATLRCSPISGHTSVYWYQQALGLGLQFLLWYDEGEERNRGNFPPRFSGRQFPNYSSELNVNALELEDSALYLCASSLTGDPHEQFFGPGTRLTVLEDLKNVFPPEVAVFEPSEAEISHTQKATLVCLATGFYPDHVELSWWVNGKEVHSGVSTDPQPLKEQPALNDSRYCLSSRLRVSATFWQNPRNHFRCQVQFYGLSENDEWTQDRAKPVTQIVSAEAWGRADCGFTSESYQQGVLSATILYEILLGKATLYAVLVSALVLMAMVKRKDSRG

SEQ ID NO: 714 - protein, 271 aa, Homo sapiens
METLLGLLILWLQLQWVSSKQEVTQIPAALSVPEGENLVLNCSFTDSAIYNLQWFRQDPGKGLTSLLLIQSSQREQTSGRLNASLDKSSGRSTLYIAASQPGDSATYLCAFFSSNTGKLIFGQGTTLQVKPDIQNPDPAVYQLRDSKSSDKSVCLFTDFDSQTNVSQSKDSDVYITDKTVLDMRSMDFKSNSAVAWSNKSDFACANAFNNSIIPEDTFFPSPESSCDVKLVEKSFETDTNLNFQNLSVIGFRILLLKVAGFNLLMTLRLWS

SEQ ID NO: 715 - protein, 319 aa, Homo sapiens
MLLLLLLLGPGISLLLPGSLAGSGLGAVVSQHPSWVICKSGTSVKIECRSLDFQATTMFWYRQFPKQSLMLMATSNEGSKATYEQGVEKDKFLINHASLTLSTLTVTSAHPEDSSFYICSAEGTVSYEQYFGPGTRLTVTEDLKNVFPPEVAVFEPSEAEISHTQKATLVCLATGFYPDHVELSWWVNGKEVHSGVSTDPQPLKEQPALNDSRYCLSSRLRVSATFWQNPRNHFRCQVQFYGLSENDEWTQDRAKPVTQIVSAEAWGRADCGFTSESYQQGVLSATILYEILLGKATLYAVLVSALVLMAMVKRKDSRG

SEQ ID NO: 716 - protein, 267 aa, Homo sapiens
MWGVFLLYVSMKMGGTTGQNIDQPTEMTATEGAIVQINCTYQTSGFNGLFWYQQHAGEAPTFLSYNVLDGLEEKGRFSSFLSRSKGYSYLLLKELQMKDSASYLCAPWAGGYQKVTFGIGTKLQVIPNIQNPDPAVYQLRDSKSSDKSVCLFTDFDSQTNVSQSKDSDVYITDKTVLDMRSMDFKSNSAVAWSNKSDFACANAFNNSIIPEDTFFPSPESSCDVKLVEKSFETDTNLNFQNLSVIGFRILLLKVAGFNLLMTLRLWS

SEQ ID NO: 717 - protein, 312 aa, Homo sapiens
MGIRLLCRVAFCFLAVGLVDVKVTQSSRYLVKRTGEKVFLECVQDMDHENMFWYRQDPGLGLRLIYFSYDVKMKEKGDIPEGYSVSREKKERFSLILESASTNQTSMYLCASLPPPGTTYEQYFGPGTRLTVTEDLKNVFPPEVAVFEPSEAEISHTQKATLVCLATGFYPDHVELSWWVNGKEVHSGVSTDPQPLKEQPALNDSRYCLSSRLRVSATFWQNPRNHFRCQVQFYGLSENDEWTQDRAKPVTQIVSAEAWGRADCGFTSESYQQGVLSATILYEILLGKATLYAVLVSALVLMAMVKRKDSRG

SEQ ID NO: 718 - protein, 272 aa, Homo sapiens
MKSLRVLLVILWLQLSWVWSQQKEVEQNSGPLSVPEGAIASLNCTYSDRGSQSFFWYRQYSGKSPELIMFIYSNGDKEDGRFTAQLNKASQYVSLLIRDSQPSDSATYLCAVITGGYNKLIFGAGTRLAVHPYIQNPDPAVYQLRDSKSSDKSVCLFTDFDSQTNVSQSKDSDVYITDKTVLDMRSMDFKSNSAVAWSNKSDFACANAFNNSIIPEDTFFPSPESSCDVKLVEKSFETDTNLNFQNLSVIGFRILLLKVAGFNLLMTLRLWS

SEQ ID NO: 719 - protein, 310 aa, Homo sapiens
MSNQVLCCVVLCFLGANTVDGGITQSPKYLFRKEGQNVTLSCEQNLNHDAMYWYRQDPGQGLRLIYYSQIVNDFQKGDIAEGYSVSREKKESFPLTVTSAQKNPTAFYLCASTPPEDRATEAFFGQGTRLTVVEDLNKVFPPEVAVFEPSEAEISHTQKATLVCLATGFFPDHVELSWWVNGKEVHSGVSTDPQPLKEQPALNDSRYCLSSRLRVSATFWQNPRNHFRCQVQFYGLSENDEWTQDRAKPVTQIVSAEAWGRADCGFTSVSYQQGVLSATILYEILLGKATLYAVLVSALVLMAMVKRKDF

SEQ ID NO: 720 - protein, 268 aa, Homo sapiens
MWGVFLLYVSMKMGGTTGQNIDQPTEMTATEGAIVQINCTYQTSGFNGLFWYQQHAGEAPTFLSYNVLDGLEEKGRFSSFLSRSKGYSYLLLKELQMKDSASYLCAVSPYNTDKLIFGTGTRLQVFPNIIQNPDPAVYQLRDSKSSDKSVCLFTDFDSQTNVSQSKDSDVYITDKTVLDMRSMDFKSNSAVAWSNKSDFACANAFNNSIIPEDTFFPSPESSCDVKLVEKSFETDTNLNFQNLSVIGFRILLLKVAGFNLLMTLRLWS

SEQ ID NO: 721 - protein, 311 aa, Homo sapiens
MGPGLLCWALLCLLGAGLVDAGVTQSPTHLIKTRGQQVTLRCSPKSGHDTVSWYQQALGQGPQFIFQYYEEEERQRGNFPDRFSGHQFPNYSSELNVNALLLGDSALYLCASSLADLRHNYGYTFGSGTRLTVVEDLNKVFPPEVAVFEPSEAEISHTQKATLVCLATGFFPDHVELSWWVNGKEVHSGVSTDPQPLKEQPALNDSRYCLSSRLRVSATFWQNPRNHFRCQVQFYGLSENDEWTQDRAKPVTQIVSAEAWGRADCGFTSVSYQQGVLSATILYEILLGKATLYAVLVSALVLMAMVKRKDF

SEQ ID NO: 722 - protein, 281 aa, Homo sapiens
MAMLLGASVLILWLQPDWVNSQQKNDDQQVKQNSPSLSVQEGRISILNCDYTNSMFDYFLWYKKYPAEGPTFLISISSIKDKNEDGRFTVFLNKSAKHLSLHIVPSQPGDSAVYFCAASEGRGSTLGRLYFGRGTQLTVWPDIQNPDPAVYQLRDSKSSDKSVCLFTDFDSQTNVSQSKDSDVYITDKTVLDMRSMDFKSNSAVAWSNKSDFACANAFNNSIIPEDTFFPSPESSCDVKLVEKSFETDTNLNFQNLSVIGFRILLLKVAGFNLLMTLRLWS

SEQ ID NO: 723 - protein, 319 aa, Homo sapiens
MLLLLLLLGPGISLLLPGSLAGSGLGAVVSQHPSWVICKSGTSVKIECRSLDFQATTMFWYRQFPKQSLMLMATSNEGSKATYEQGVEKDKFLINHASLTLSTLTVTSAHPEDSSFYICSALDERVYEQYFGPGTRLTVTEDLKNVFPPEVAVFEPSEAEISHTQKATLVCLATGFYPDHVELSWWVNGKEVHSGVSTDPQPLKEQPALNDSRYCLSSRLRVSATFWQNPRNHFRCQVQFYGLSENDEWTQDRAKPVTQIVSAEAWGRADCGFTSESYQQGVLSATILYEILLGKATLYAVLVSALVLMAMVKRKDSRG

SEQ ID NO: 724 - protein, 272 aa, Homo sapiens
MESFLGGVLLILWLQVDWVKSQKIEQNSEALNIQEGKTATLTCNYTNYSPAYLQWYRQDPGRGPVFLLLIRENEKEKRKERLKVTFDTTLKQSLFHITASQPADSATYLCALVADAGNMLTFGGGTRLMVKPHIQNPDPAVYQLRDSKSSDKSVCLFTDFDSQTNVSQSKDSDVYITDKTVLDMRSMDFKSNSAVAWSNKSDFACANAFNNSIIPEDTFFPSPESSCDVKLVEKSFETDTNLNFQNLSVIGFRILLLKVAGFNLLMTLRLWS

SEQ ID NO: 725 - protein, 310 aa, Homo sapiens
MDTWLVCWAIFSLLKAGLTEPEVTQTPSHQVTQMGQEVILRCVPISNHLYFYWYRQILGQKVEFLVSFYNNEISEKSEIFDDQFSVERPDGSNFTLKIRSTKLEDSAMYFCASSVGGLDTEAFFGQGTRLTVVEDLNKVFPPEVAVFEPSEAEISHTQKATLVCLATGFFPDHVELSWWVNGKEVHSGVSTDPQPLKEQPALNDSRYCLSSRLRVSATFWQNPRNHFRCQVQFYGLSENDEWTQDRAKPVTQIVSAEAWGRADCGFTSVSYQQGVLSATILYEILLGKATLYAVLVSALVLMAMVKRKDF

SEQ ID NO: 726 - protein, 272 aa, Homo sapiens
MTSIRAVFIFLWLQLDLVNGENVEQHPSTLSVQEGDSAVIKCTYSDSASNYFPWYKQELGKGPQLIIDIRSNVGEKKDQRIAVTLNKTAKHFSLHITETQPEDSAVYFCAASEATNAGKSTFGDGTTLTVKPNIQNPDPAVYQLRDSKSSDKSVCLFTDFDSQTNVSQSKDSDVYITDKTVLDMRSMDFKSNSAVAWSNKSDFACANAFNNSIIPEDTFFPSPESSCDVKLVEKSFETDTNLNFQNLSVIGFRILLLKVAGFNLLMTLRLWS

SEQ ID NO: 727 - protein, 308 aa, Homo sapiens
MGPQLLGYVVLCLLGAGPLEAQVTQNPRYLITVTGKKLTVTCSQNMNHEYMSWYRQDPGLGLRQIYYSMNVEVTDKGDVPEGYKVSRKEKRNFPLILESPSPNQTSLYFCASSSWGREGYTFGSGTRLTVVEDLNKVFPPEVAVFEPSEAEISHTQKATLVCLATGFFPDHVELSWWVNGKEVHSGVSTDPQPLKEQPALNDSRYCLSSRLRVSATFWQNPRNHFRCQVQFYGLSENDEWTQDRAKPVTQIVSAEAWGRADCGFTSVSYQQGVLSATILYEILLGKATLYAVLVSALVLMAMVKRKDF

SEQ ID NO: 728 - protein, 267 aa, Homo sapiens
MWGVFLLYVSMKMGGTTGQNIDQPTEMTATEGAIVQINCTYQTSGFNGLFWYQQHAGEAPTFLSYNVLDGLEEKGRFSSFLSRSKGYSYLLLKELQMKDSASYLCAVFSGGYQKVTFGIGTKLQVIPNIQNPDPAVYQLRDSKSSDKSVCLFTDFDSQTNVSQSKDSDVYITDKTVLDMRSMDFKSNSAVAWSNKSDFACANAFNNSIIPEDTFFPSPESSCDVKLVEKSFETDTNLNFQNLSVIGFRILLLKVAGFNLLMTLRLWS

SEQ ID NO: 729 - protein, 309 aa, Homo sapiens
MSIGLLCCAALSLLWAGPVNAGVTQTPKFQVLKTGQSMTLQCAQDMNHEYMSWYRQDPGMGLRLIHYSVGAGITDQGEVPNGYNVSRSTTEDFPLRLLSAAPSQTSVYFCASSGDSYEQFFGPGTRLTVLEDLKNVFPPEVAVFEPSEAEISHTQKATLVCLATGFYPDHVELSWWVNGKEVHSGVSTDPQPLKEQPALNDSRYCLSSRLRVSATFWQNPRNHFRCQVQFYGLSENDEWTQDRAKPVTQIVSAEAWGRADCGFTSESYQQGVLSATILYEILLGKATLYAVLVSALVLMAMVKRKDSRG

SEQ ID NO: 730 - protein, 271 aa, Homo sapiens
METLLGVSLVILWLQLARVNSQQGEEDPQALSIQEGENATMNCSYKTSINNLQWYRQNSGRGLVHLILIRSNEREKHSGRLRVTLDTSKKSSSLLITASRAADTASYFCATHNQAGTALIFGKGTTLSVSSNIQNPDPAVYQLRDSKSSDKSVCLFTDFDSQTNVSQSKDSDVYITDKTVLDMRSMDFKSNSAVAWSNKSDFACANAFNNSIIPEDTFFPSPESSCDVKLVEKSFETDTNLNFQNLSVIGFRILLLKVAGFNLLMTLRLWS

SEQ ID NO: 731 - protein, 309 aa, Homo sapiens
MGIRLLCRVAFCFLAVGLVDVKVTQSSRYLVKRTGEKVFLECVQDMDHENMFWYRQDPGLGLRLIYFSYDVKMKEKGDIPEGYSVSREKKERFSLILESASTNQTSMYLCASSSEAPYYGYTFGSGTRLTVVEDLNKVFPPEVAVFEPSEAEISHTQKATLVCLATGFFPDHVELSWWVNGKEVHSGVSTDPQPLKEQPALNDSRYCLSSRLRVSATFWQNPRNHFRCQVQFYGLSENDEWTQDRAKPVTQIVSAEAWGRADCGFTSVSYQQGVLSATILYEILLGKATLYAVLVSALVLMAMVKRKDF

SEQ ID NO: 732 - protein, 273 aa, Homo sapiens
MNYSPGLVSLILLLLGRTRGNSVTQMEGPVTLSEEAFLTINCTYTATGYPSLFWYVQYPGEGLQLLLKATKADDKGSNKGFEATYRKETTSFHLEKGSVQVSDSAVYFCALSGLPNTGNQFYFGTGTSLTVIPNIQNPDPAVYQLRDSKSSDKSVCLFTDFDSQTNVSQSKDSDVYITDKTVLDMRSMDFKSNSAVAWSNKSDFACANAFNNSIIPEDTFFPSPESSCDVKLVEKSFETDTNLNFQNLSVIGFRILLLKVAGFNLLMTLRLWS

SEQ ID NO: 733 - protein, 311 aa, Homo sapiens
MGPQLLGYVVLCLLGAGPLEAQVTQNPRYLITVTGKKLTVTCSQNMNHEYMSWYRQDPGLGLRQIYYSMNVEVTDKGDVPEGYKVSRKEKRNFPLILESPSPNQTSLYFCASSLDGFSYEQYFGPGTRLTVTEDLKNVFPPEVAVFEPSEAEISHTQKATLVCLATGFYPDHVELSWWVNGKEVHSGVSTDPQPLKEQPALNDSRYCLSSRLRVSATFWQNPRNHFRCQVQFYGLSENDEWTQDRAKPVTQIVSAEAWGRADCGFTSESYQQGVLSATILYEILLGKATLYAVLVSALVLMAMVKRKDSRG

SEQ ID NO: 734 - protein, 268 aa, Homo sapiens
MLLEHLLIILWMQLTWVSGQQLNQSPQSMFIQEGEDVSMNCTSSSIFNTWLWYKQEPGEGPVLLIALYKAGELTSNGRLTAQFGITRKDSFLNISASIPSDVGIYFCAGQMTGNQFYFGTGTSLTVIPNIQNPDPAVYQLRDSKSSDKSVCLFTDFDSQTNVSQSKDSDVYITDKTVLDMRSMDFKSNSAVAWSNKSDFACANAFNNSIIPEDTFFPSPESSCDVKLVEKSFETDTNLNFQNLSVIGFRILLLKVAGFNLLMTLRLWS

SEQ ID NO: 735 - protein, 311 aa, Homo sapiens
MGPQLLGYVVLCLLGAGPLEAQVTQNPRYLITVTGKKLTVTCSQNMNHEYMSWYRQDPGLGLRQIYYSMNVEVTDKGDVPEGYKVSRKEKRNFPLILESPSPNQTSLYFCASSSGAPQETQYFGPGTRLLVLEDLKNVFPPEVAVFEPSEAEISHTQKATLVCLATGFYPDHVELSWWVNGKEVHSGVSTDPQPLKEQPALNDSRYCLSSRLRVSATFWQNPRNHFRCQVQFYGLSENDEWTQDRAKPVTQIVSAEAWGRADCGFTSESYQQGVLSATILYEILLGKATLYAVLVSALVLMAMVKRKDSRG

SEQ ID NO: 736 - protein, 274 aa, Homo sapiens
METLLGLLILWLQLQWVSSKQEVTQIPAALSVPEGENLVLNCSFTDSAIYNLQWFRQDPGKGLTSLLLIQSSQREQTSGRLNASLDKSSGRSTLYIAASQPGDSATYLCAVNWPPMNRDDKIIFGKGTRLHILPNIQNPDPAVYQLRDSKSSDKSVCLFTDFDSQTNVSQSKDSDVYITDKTVLDMRSMDFKSNSAVAWSNKSDFACANAFNNSIIPEDTFFPSPESSCDVKLVEKSFETDTNLNFQNLSVIGFRILLLKVAGFNLLMTLRLWS

SEQ ID NO: 737 - protein, 307 aa, Homo sapiens
MGPGLLCWALLCLLGAGLVDAGVTQSPTHLIKTRGQQVTLRCSPKSGHDTVSWYQQALGQGPQFIFQYYEEEERQRGNFPDRFSGHQFPNYSSELNVNALLLGDSALYLCASSLADGEAFFGQGTRLTVVEDLNKVFPPEVAVFEPSEAEISHTQKATLVCLATGFFPDHVELSWWVNGKEVHSGVSTDPQPLKEQPALNDSRYCLSSRLRVSATFWQNPRNHFRCQVQFYGLSENDEWTQDRAKPVTQIVSAEAWGRADCGFTSVSYQQGVLSATILYEILLGKATLYAVLVSALVLMAMVKRKDF

SEQ ID NO: 738 - protein, 268 aa, Homo sapiens
MLLEHLLIILWMQLTWVSGQQLNQSPQSMFIQEGEDVSMNCTSSSIFNTWLWYKQEPGEGPVLLIALYKAGELTSNGRLTAQFGITRKDSFLNISASIPSDVGIYFCAGQGAGNMLTFGGGTRLMVKPHIQNPDPAVYQLRDSKSSDKSVCLFTDFDSQTNVSQSKDSDVYITDKTVLDMRSMDFKSNSAVAWSNKSDFACANAFNNSIIPEDTFFPSPESSCDVKLVEKSFETDTNLNFQNLSVIGFRILLLKVAGFNLLMTLRLWS

SEQ ID NO: 739 - protein, 309 aa, Homo sapiens
MGPQLLGYVVLCLLGAGPLEAQVTQNPRYLITVTGKKLTVTCSQNMNHEYMSWYRQDPGLGLRQIYYSMNVEVTDKGDVPEGYKVSRKEKRNFPLILESPSPNQTSLYFCASSSRGPNEKLFFGSGTQLSVLEDLNKVFPPEVAVFEPSEAEISHTQKATLVCLATGFFPDHVELSWWVNGKEVHSGVSTDPQPLKEQPALNDSRYCLSSRLRVSATFWQNPRNHFRCQVQFYGLSENDEWTQDRAKPVTQIVSAEAWGRADCGFTSVSYQQGVLSATILYEILLGKATLYAVLVSALVLMAMVKRKDF

SEQ ID NO: 740 - protein, 271 aa, Homo sapiens
MNYSPGLVSLILLLLGRTRGNSVTQMEGPVTLSEEAFLTINCTYTATGYPSLFWYVQYPGEGLQLLLKATKADDKGSNKGFEATYRKETTSFHLEKGSVQVSDSAVYFCAHSYNTDKLIFGTGTRLQVFPNIIQNPDPAVYQLRDSKSSDKSVCLFTDFDSQTNVSQSKDSDVYITDKTVLDMRSMDFKSNSAVAWSNKSDFACANAFNNSIIPEDTFFPSPESSCDVKLVEKSFETDTNLNFQNLSVIGFRILLLKVAGFNLLMTLRLWS

SEQ ID NO: 741 - protein, 311 aa, Homo sapiens
MGPQLLGYVVLCLLGAGPLEAQVTQNPRYLITVTGKKLTVTCSQNMNHEYMSWYRQDPGLGLRQIYYSMNVEVTDKGDVPEGYKVSRKEKRNFPLILESPSPNQTSLYFCASSPLGLRDGQYFGPGTRLTVTEDLKNVFPPEVAVFEPSEAEISHTQKATLVCLATGFYPDHVELSWWVNGKEVHSGVSTDPQPLKEQPALNDSRYCLSSRLRVSATFWQNPRNHFRCQVQFYGLSENDEWTQDRAKPVTQIVSAEAWGRADCGFTSESYQQGVLSATILYEILLGKATLYAVLVSALVLMAMVKRKDSRG

SEQ ID NO: 742 - protein, 270 aa, Homo sapiens
MNYSPGLVSLILLLLGRTRGNSVTQMEGPVTLSEEAFLTINCTYTATGYPSLFWYVQYPGEGLQLLLKATKADDKGSNKGFEATYRKETTSFHLEKGSVQVSDSAVYFCALSATGNQFYFGTGTSLTVIPNIQNPDPAVYQLRDSKSSDKSVCLFTDFDSQTNVSQSKDSDVYITDKTVLDMRSMDFKSNSAVAWSNKSDFACANAFNNSIIPEDTFFPSPESSCDVKLVEKSFETDTNLNFQNLSVIGFRILLLKVAGFNLLMTLRLWS

SEQ ID NO: 743 - protein, 311 aa, Homo sapiens
MGPQLLGYVVLCLLGAGPLEAQVTQNPRYLITVTGKKLTVTCSQNMNHEYMSWYRQDPGLGLRQIYYSMNVEVTDKGDVPEGYKVSRKEKRNFPLILESPSPNQTSLYFCASSLSGPKETQYFGPGTRLLVLEDLKNVFPPEVAVFEPSEAEISHTQKATLVCLATGFYPDHVELSWWVNGKEVHSGVSTDPQPLKEQPALNDSRYCLSSRLRVSATFWQNPRNHFRCQVQFYGLSENDEWTQDRAKPVTQIVSAEAWGRADCGFTSESYQQGVLSATILYEILLGKATLYAVLVSALVLMAMVKRKDSRG

SEQ ID NO: 744 - protein, 278 aa, Homo sapiens
MAMLLGASVLILWLQPDWVNSQQKNDDQQVKQNSPSLSVQEGRISILNCDYTNSMFDYFLWYKKYPAEGPTFLISISSIKDKNEDGRFTVFLNKSAKHLSLHIVPSQPGDSAVYFCAASVGTGNQFYFGTGTSLTVIPNIQNPDPAVYQLRDSKSSDKSVCLFTDFDSQTNVSQSKDSDVYITDKTVLDMRSMDFKSNSAVAWSNKSDFACANAFNNSIIPEDTFFPSPESSCDVKLVEKSFETDTNLNFQNLSVIGFRILLLKVAGFNLLMTLRLWS

SEQ ID NO: 745 - protein, 311 aa, Homo sapiens
MSTRLLCWMALCLLGAELSEAEVAQSPRYKITEKSQAVAFWCDPISGHATLYWYRQILGQGPELLVQFQDESVVDDSQLPKDRFSAERLKGVDSTLKIQPAELGDSAMYLCASTQDLTDTQYFGPGTRLTVLEDLKNVFPPEVAVFEPSEAEISHTQKATLVCLATGFYPDHVELSWWVNGKEVHSGVSTDPQPLKEQPALNDSRYCLSSRLRVSATFWQNPRNHFRCQVQFYGLSENDEWTQDRAKPVTQIVSAEAWGRADCGFTSESYQQGVLSATILYEILLGKATLYAVLVSALVLMAMVKRKDSRG

SEQ ID NO: 746 - protein, 275 aa, Homo sapiens
MASAPISMLAMLFTLSGLRAQSVAQPEDQVNVAEGNPLTVKCTYSVSGNPYLFWYVQYPNRGLQFLLKYITGDNLVKGSYGFEAEFNKSQTSFHLKKPSALVSDSALYFCAVREYYGGATNKLIFGTGTLLAVQPNIQNPDPAVYQLRDSKSSDKSVCLFTDFDSQTNVSQSKDSDVYITDKTVLDMRSMDFKSNSAVAWSNKSDFACANAFNNSIIPEDTFFPSPESSCDVKLVEKSFETDTNLNFQNLSVIGFRILLLKVAGFNLLMTLRLWS

SEQ ID NO: 747 - protein, 310 aa, Homo sapiens
MLSLLLLLLGLGSVFSAVISQKPSRDICQRGTSLTIQCQVDSQVTMMFWYRQQPGQSLTLIATANQGSEATYESGFVIDKFPISRPNLTFSTLTVSNMSPEDSSIYLCSVEDSGGFGDTQYFGPGTRLTVLEDLKNVFPPEVAVFEPSEAEISHTQKATLVCLATGFYPDHVELSWWVNGKEVHSGVSTDPQPLKEQPALNDSRYCLSSRLRVSATFWQNPRNHFRCQVQFYGLSENDEWTQDRAKPVTQIVSAEAWGRADCGFTSESYQQGVLSATILYEILLGKATLYAVLVSALVLMAMVKRKDSRG

SEQ ID NO: 748 - protein, 279 aa, Homo sapiens
MAMLLGASVLILWLQPDWVNSQQKNDDQQVKQNSPSLSVQEGRISILNCDYTNSMFDYFLWYKKYPAEGPTFLISISSIKDKNEDGRFTVFLNKSAKHLSLHIVPSQPGDSAVYFCAASFGFGNEKLTFGTGTRLTIIPNIQNPDPAVYQLRDSKSSDKSVCLFTDFDSQTNVSQSKDSDVYITDKTVLDMRSMDFKSNSAVAWSNKSDFACANAFNNSIIPEDTFFPSPESSCDVKLVEKSFETDTNLNFQNLSVIGFRILLLKVAGFNLLMTLRLWS

SEQ ID NO: 749 - protein, 308 aa, Homo sapiens
MGFRLLCCVAFCLLGAGPVDSGVTQTPKHLITATGQRVTLRCSPRSGDLSVYWYQQSLDQGLQFLIQYYNGEERAKGNILERFSAQQFPDLHSELNLSSLELGDSALYFCASSAGSQYGYTFGSGTRLTVVEDLNKVFPPEVAVFEPSEAEISHTQKATLVCLATGFFPDHVELSWWVNGKEVHSGVSTDPQPLKEQPALNDSRYCLSSRLRVSATFWQNPRNHFRCQVQFYGLSENDEWTQDRAKPVTQIVSAEAWGRADCGFTSVSYQQGVLSATILYEILLGKATLYAVLVSALVLMAMVKRKDF

SEQ ID NO: 750 - protein, 274 aa, Homo sapiens
MTSIRAVFIFLWLQLDLVNGENVEQHPSTLSVQEGDSAVIKCTYSDSASNYFPWYKQELGKGPQLIIDIRSNVGEKKDQRIAVTLNKTAKHFSLHITETQPEDSAVYFCAGPKRYGGSQGNLIFGKGTKLSVKPNIQNPDPAVYQLRDSKSSDKSVCLFTDFDSQTNVSQSKDSDVYITDKTVLDMRSMDFKSNSAVAWSNKSDFACANAFNNSIIPEDTFFPSPESSCDVKLVEKSFETDTNLNFQNLSVIGFRILLLKVAGFNLLMTLRLWS

SEQ ID NO: 751 - protein, 311 aa, Homo sapiens
MGPQLLGYVVLCLLGAGPLEAQVTQNPRYLITVTGKKLTVTCSQNMNHEYMSWYRQDPGLGLRQIYYSMNVEVTDKGDVPEGYKVSRKEKRNFPLILESPSPNQTSLYFCASSLSSGAETQYFGPGTRLLVLEDLKNVFPPEVAVFEPSEAEISHTQKATLVCLATGFYPDHVELSWWVNGKEVHSGVSTDPQPLKEQPALNDSRYCLSSRLRVSATFWQNPRNHFRCQVQFYGLSENDEWTQDRAKPVTQIVSAEAWGRADCGFTSESYQQGVLSATILYEILLGKATLYAVLVSALVLMAMVKRKDSRG

SEQ ID NO: 752 - protein, 270 aa, Homo sapiens
MNYSPGLVSLILLLLGRTRGNSVTQMEGPVTLSEEAFLTINCTYTATGYPSLFWYVQYPGEGLQLLLKATKADDKGSNKGFEATYRKETTSFHLEKGSVQVSDSAVYFCALTRSQGNLIFGKGTKLSVKPNIQNPDPAVYQLRDSKSSDKSVCLFTDFDSQTNVSQSKDSDVYITDKTVLDMRSMDFKSNSAVAWSNKSDFACANAFNNSIIPEDTFFPSPESSCDVKLVEKSFETDTNLNFQNLSVIGFRILLLKVAGFNLLMTLRLWS

SEQ ID NO: 753 - protein, 274 aa, Homo sapiens
MKSLRVLLVILWLQLSWVWSQQKEVEQNSGPLSVPEGAIASLNCTYSDRGSQSFFWYRQYSGKSPELIMFIYSNGDKEDGRFTAQLNKASQYVSLLIRDSQPSDSATYLCAVNMEGGNDYKLSFGAGTTVTVRANIQNPDPAVYQLRDSKSSDKSVCLFTDFDSQTNVSQSKDSDVYITDKTVLDMRSMDFKSNSAVAWSNKSDFACANAFNNSIIPEDTFFPSPESSCDVKLVEKSFETDTNLNFQNLSVIGFRILLLKVAGFNLLMTLRLWS

SEQ ID NO: 754 - protein, 309 aa, Homo sapiens
MSIGLLCCVAFSLLWASPVNAGVTQTPKFQVLKTGQSMTLQCAQDMNHNSMYWYRQDPGMGLRLIYYSASEGTTDKGEVPNGYNVSRLNKREFSLRLESAAPSQTSVYFCASSDYGYEQFFGPGTRLTVLEDLKNVFPPEVAVFEPSEAEISHTQKATLVCLATGFYPDHVELSWWVNGKEVHSGVSTDPQPLKEQPALNDSRYCLSSRLRVSATFWQNPRNHFRCQVQFYGLSENDEWTQDRAKPVTQIVSAEAWGRADCGFTSESYQQGVLSATILYEILLGKATLYAVLVSALVLMAMVKRKDSRG

SEQ ID NO: 755 - protein, 271 aa, Homo sapiens
MLLLLIPVLGMIFALRDARAQSVSQHNHHVILSEAASLELGCNYSYGGTVNLFWYVQYPGQHLQLLLKYFSGDPLVKGIKGFEAEFIKSKFSFNLRKPSVQWSDTAEYFCAVNGDGQKLLFARGTMLKVDLNIQNPDPAVYQLRDSKSSDKSVCLFTDFDSQTNVSQSKDSDVYITDKTVLDMRSMDFKSNSAVAWSNKSDFACANAFNNSIIPEDTFFPSPESSCDVKLVEKSFETDTNLNFQNLSVIGFRILLLKVAGFNLLMTLRLWS

SEQ ID NO: 756 - protein, 312 aa, Homo sapiens
MSLGLLCCGAFSLLWAGPVNAGVTQTPKFRVLKTGQSMTLLCAQDMNHEYMYWYRQDPGMGLRLIHYSVGEGTTAKGEVPDGYNVSRLKKQNFLLGLESAAPSQTSVYFCASSYLTVNTGELFFGEGSRLTVLEDLKNVFPPEVAVFEPSEAEISHTQKATLVCLATGFYPDHVELSWWVNGKEVHSGVSTDPQPLKEQPALNDSRYCLSSRLRVSATFWQNPRNHFRCQVQFYGLSENDEWTQDRAKPVTQIVSAEAWGRADCGFTSESYQQGVLSATILYEILLGKATLYAVLVSALVLMAMVKRKDSRG

SEQ ID NO: 757 - protein, 279 aa, Homo sapiens
MSLSSLLKVVTASLWLGPGIAQKITQTQPGMFVQEKEAVTLDCTYDTSDPSYGLFWYKQPSSGEMIFLIYQGSYDQQNATEGRYSLNFQKARKSANLVISASQLGDSAMYFCAMRDFALTGGGNKLTFGTGTQLKVELNIIQNPDPAVYQLRDSKSSDKSVCLFTDFDSQTNVSQSKDSDVYITDKTVLDMRSMDFKSNSAVAWSNKSDFACANAFNNSIIPEDTFFPSPESSCDVKLVEKSFETDTNLNFQNLSVIGFRILLLKVAGFNLLMTLRLWS

SEQ ID NO: 758 - protein, 314 aa, Homo sapiens
MGPQLLGYVVLCLLGAGPLEAQVTQNPRYLITVTGKKLTVTCSQNMNHEYMSWYRQDPGLGLRQIYYSMNVEVTDKGDVPEGYKVSRKEKRNFPLILESPSPNQTSLYFCASSGTSGSANTGELFFGEGSRLTVLEDLKNVFPPEVAVFEPSEAEISHTQKATLVCLATGFYPDHVELSWWVNGKEVHSGVSTDPQPLKEQPALNDSRYCLSSRLRVSATFWQNPRNHFRCQVQFYGLSENDEWTQDRAKPVTQIVSAEAWGRADCGFTSESYQQGVLSATILYEILLGKATLYAVLVSALVLMAMVKRKDSRG

SEQ ID NO: 759 - protein, 271 aa, Homo sapiens
MNYSPGLVSLILLLLGRTRGNSVTQMEGPVTLSEEAFLTINCTYTATGYPSLFWYVQYPGEGLQLLLKATKADDKGSNKGFEATYRKETTSFHLEKGSVQVSDSAVYFCALSGLRGNQFYFGTGTSLTVIPNIQNPDPAVYQLRDSKSSDKSVCLFTDFDSQTNVSQSKDSDVYITDKTVLDMRSMDFKSNSAVAWSNKSDFACANAFNNSIIPEDTFFPSPESSCDVKLVEKSFETDTNLNFQNLSVIGFRILLLKVAGFNLLMTLRLWS

SEQ ID NO: 760 - protein, 311 aa, Homo sapiens
MGPQLLGYVVLCLLGAGPLEAQVTQNPRYLITVTGKKLTVTCSQNMNHEYMSWYRQDPGLGLRQIYYSMNVEVTDKGDVPEGYKVSRKEKRNFPLILESPSPNQTSLYFCASSPDGAGYEQYFGPGTRLTVTEDLKNVFPPEVAVFEPSEAEISHTQKATLVCLATGFYPDHVELSWWVNGKEVHSGVSTDPQPLKEQPALNDSRYCLSSRLRVSATFWQNPRNHFRCQVQFYGLSENDEWTQDRAKPVTQIVSAEAWGRADCGFTSESYQQGVLSATILYEILLGKATLYAVLVSALVLMAMVKRKDSRG

SEQ ID NO: 761 - protein, 269 aa, Homo sapiens
METLLGVSLVILWLQLARVNSQQGEEDPQALSIQEGENATMNCSYKTSINNLQWYRQNSGRGLVHLILIRSNEREKHSGRLRVTLDTSKKSSSLLITASRAADTASYFCATDFGNQFYFGTGTSLTVIPNIQNPDPAVYQLRDSKSSDKSVCLFTDFDSQTNVSQSKDSDVYITDKTVLDMRSMDFKSNSAVAWSNKSDFACANAFNNSIIPEDTFFPSPESSCDVKLVEKSFETDTNLNFQNLSVIGFRILLLKVAGFNLLMTLRLWS

SEQ ID NO: 762 - protein, 310 aa, Homo sapiens
MGTRLFFYVALCLLWAGHRDAGITQSPRYKITETGRQVTLMCHQTWSHSYMFWYRQDLGHGLRLIYYSAAADITDKGEVPDGYVVSRSKTENFPLTLESATRSQTSVYFCASSDDPWNEQFFGPGTRLTVLEDLKNVFPPEVAVFEPSEAEISHTQKATLVCLATGFYPDHVELSWWVNGKEVHSGVSTDPQPLKEQPALNDSRYCLSSRLRVSATFWQNPRNHFRCQVQFYGLSENDEWTQDRAKPVTQIVSAEAWGRADCGFTSESYQQGVLSATILYEILLGKATLYAVLVSALVLMAMVKRKDSRG

SEQ ID NO: 763 - protein, 267 aa, Homo sapiens
MWGVFLLYVSMKMGGTTGQNIDQPTEMTATEGAIVQINCTYQTSGFNGLFWYQQHAGEAPTFLSYNVLDGLEEKGRFSSFLSRSKGYSYLLLKELQMKDSASYLCGPWTGGYQKVTFGIGTKLQVIPNIQNPDPAVYQLRDSKSSDKSVCLFTDFDSQTNVSQSKDSDVYITDKTVLDMRSMDFKSNSAVAWSNKSDFACANAFNNSIIPEDTFFPSPESSCDVKLVEKSFETDTNLNFQNLSVIGFRILLLKVAGFNLLMTLRLWS

SEQ ID NO: 764 - protein, 310 aa, Homo sapiens
MGPQLLGYVVLCLLGAGPLEAQVTQNPRYLITVTGKKLTVTCSQNMNHEYMSWYRQDPGLGLRQIYYSMNVEVTDKGDVPEGYKVSRKEKRNFPLILESPSPNQTSLYFCASGDRDLYEQYFGPGTRLTVTEDLKNVFPPEVAVFEPSEAEISHTQKATLVCLATGFYPDHVELSWWVNGKEVHSGVSTDPQPLKEQPALNDSRYCLSSRLRVSATFWQNPRNHFRCQVQFYGLSENDEWTQDRAKPVTQIVSAEAWGRADCGFTSESYQQGVLSATILYEILLGKATLYAVLVSALVLMAMVKRKDSRG

SEQ ID NO: 765 - protein, 271 aa, Homo sapiens
MESFLGGVLLILWLQVDWVKSQKIEQNSEALNIQEGKTATLTCNYTNYSPAYLQWYRQDPGRGPVFLLLIRENEKEKRKERLKVTFDTTLKQSLFHITASQPADSATYLCAPLSAGNMLTFGGGTRLMVKPHIQNPDPAVYQLRDSKSSDKSVCLFTDFDSQTNVSQSKDSDVYITDKTVLDMRSMDFKSNSAVAWSNKSDFACANAFNNSIIPEDTFFPSPESSCDVKLVEKSFETDTNLNFQNLSVIGFRILLLKVAGFNLLMTLRLWS

SEQ ID NO: 766 - protein, 310 aa, Homo sapiens
MGIRLLCRVAFCFLAVGLVDVKVTQSSRYLVKRTGEKVFLECVQDMDHENMFWYRQDPGLGLRLIYFSYDVKMKEKGDIPEGYSVSREKKERFSLILESASTNQTSMYLCASSSDGFANYGYTFGSGTRLTVVEDLNKVFPPEVAVFEPSEAEISHTQKATLVCLATGFFPDHVELSWWVNGKEVHSGVSTDPQPLKEQPALNDSRYCLSSRLRVSATFWQNPRNHFRCQVQFYGLSENDEWTQDRAKPVTQIVSAEAWGRADCGFTSVSYQQGVLSATILYEILLGKATLYAVLVSALVLMAMVKRKDF

SEQ ID NO: 767 - protein, 274 aa, Homo sapiens
MKTFAGFSFLFLWLQLDCMSRGEDVEQSLFLSVREGDSSVINCTYTDSSSTYLYWYKQEPGAGLQLLTYIFSNMDMKQDQRLTVLLNKKDKHLSLRIADTQTGDSAIYFCAETLGSGGYQKVTFGIGTKLQVIPNIQNPDPAVYQLRDSKSSDKSVCLFTDFDSQTNVSQSKDSDVYITDKTVLDMRSMDFKSNSAVAWSNKSDFACANAFNNSIIPEDTFFPSPESSCDVKLVEKSFETDTNLNFQNLSVIGFRILLLKVAGFNLLMTLRLWS

SEQ ID NO: 768 - protein, 313 aa, Homo sapiens
MGPQLLGYVVLCLLGAGPLEAQVTQNPRYLITVTGKKLTVTCSQNMNHEYMSWYRQDPGLGLRQIYYSMNVEVTDKGDVPEGYKVSRKEKRNFPLILESPSPNQTSLYFCASSPLKFTQEETQYFGPGTRLLVLEDLKNVFPPEVAVFEPSEAEISHTQKATLVCLATGFYPDHVELSWWVNGKEVHSGVSTDPQPLKEQPALNDSRYCLSSRLRVSATFWQNPRNHFRCQVQFYGLSENDEWTQDRAKPVTQIVSAEAWGRADCGFTSESYQQGVLSATILYEILLGKATLYAVLVSALVLMAMVKRKDSRG

SEQ ID NO: 769 - protein, 270 aa, Homo sapiens
MESFLGGVLLILWLQVDWVKSQKIEQNSEALNIQEGKTATLTCNYTNYSPAYLQWYRQDPGRGPVFLLLIRENEKEKRKERLKVTFDTTLKQSLFHITASQPADSATYLCALAFNKFYFGSGTKLNVKPNIIQNPDPAVYQLRDSKSSDKSVCLFTDFDSQTNVSQSKDSDVYITDKTVLDMRSMDFKSNSAVAWSNKSDFACANAFNNSIIPEDTFFPSPESSCDVKLVEKSFETDTNLNFQNLSVIGFRILLLKVAGFNLLMTLRLWS

SEQ ID NO: 770 - protein, 309 aa, Homo sapiens
MGIRLLCRVAFCFLAVGLVDVKVTQSSRYLVKRTGEKVFLECVQDMDHENMFWYRQDPGLGLRLIYFSYDVKMKEKGDIPEGYSVSREKKERFSLILESASTNQTSMYLCATTPGHSNQPQHFGDGTRLSILEDLNKVFPPEVAVFEPSEAEISHTQKATLVCLATGFFPDHVELSWWVNGKEVHSGVSTDPQPLKEQPALNDSRYCLSSRLRVSATFWQNPRNHFRCQVQFYGLSENDEWTQDRAKPVTQIVSAEAWGRADCGFTSVSYQQGVLSATILYEILLGKATLYAVLVSALVLMAMVKRKDF

SEQ ID NO: 771 - protein, 270 aa, Homo sapiens
MESFLGGVLLILWLQVDWVKSQKIEQNSEALNIQEGKTATLTCNYTNYSPAYLQWYRQDPGRGPVFLLLIRENEKEKRKERLKVTFDTTLKQSLFHITASQPADSATYLCALVTGNQFYFGTGTSLTVIPNIQNPDPAVYQLRDSKSSDKSVCLFTDFDSQTNVSQSKDSDVYITDKTVLDMRSMDFKSNSAVAWSNKSDFACANAFNNSIIPEDTFFPSPESSCDVKLVEKSFETDTNLNFQNLSVIGFRILLLKVAGFNLLMTLRLWS

SEQ ID NO: 772 - protein, 309 aa, Homo sapiens
MSLGLLCCGAFSLLWAGPVNAGVTQTPKFRVLKTGQSMTLLCAQDMNHEYMYWYRQDPGMGLRLIHYSVGEGTTAKGEVPDGYNVSRLKKQNFLLGLESAAPSQTSVYFCASNWGGSNQPQHFGDGTRLSILEDLNKVFPPEVAVFEPSEAEISHTQKATLVCLATGFFPDHVELSWWVNGKEVHSGVSTDPQPLKEQPALNDSRYCLSSRLRVSATFWQNPRNHFRCQVQFYGLSENDEWTQDRAKPVTQIVSAEAWGRADCGFTSVSYQQGVLSATILYEILLGKATLYAVLVSALVLMAMVKRKDF

SEQ ID NO: 773 - protein, 269 aa, Homo sapiens
MVLKFSVSILWIQLAWVSTQLLEQSPQFLSIQEGENLTVYCNSSSVFSSLQWYRQEPGEGPVLLVTVVTGGEVKKLKRLTFQFGDARKDSSLHITAAQPGDTGLYLCARGMDSNYQLIWGAGTKLIIKPDIQNPDPAVYQLRDSKSSDKSVCLFTDFDSQTNVSQSKDSDVYITDKTVLDMRSMDFKSNSAVAWSNKSDFACANAFNNSIIPEDTFFPSPESSCDVKLVEKSFETDTNLNFQNLSVIGFRILLLKVAGFNLLMTLRLWS

SEQ ID NO: 774 - protein, 309 aa, Homo sapiens
MGPQLLGYVVLCLLGAGPLEAQVTQNPRYLITVTGKKLTVTCSQNMNHEYMSWYRQDPGLGLRQIYYSMNVEVTDKGDVPEGYKVSRKEKRNFPLILESPSPNQTSLYFCASSWRDHQDEAFFGQGTRLTVVEDLNKVFPPEVAVFEPSEAEISHTQKATLVCLATGFFPDHVELSWWVNGKEVHSGVSTDPQPLKEQPALNDSRYCLSSRLRVSATFWQNPRNHFRCQVQFYGLSENDEWTQDRAKPVTQIVSAEAWGRADCGFTSVSYQQGVLSATILYEILLGKATLYAVLVSALVLMAMVKRKDF

SEQ ID NO: 775 - protein, 280 aa, Homo sapiens
MAMLLGASVLILWLQPDWVNSQQKNDDQQVKQNSPSLSVQEGRISILNCDYTNSMFDYFLWYKKYPAEGPTFLISISSIKDKNEDGRFTVFLNKSAKHLSLHIVPSQPGDSAVYFCAAPGSGFGNEKLTFGTGTRLTIIPNIQNPDPAVYQLRDSKSSDKSVCLFTDFDSQTNVSQSKDSDVYITDKTVLDMRSMDFKSNSAVAWSNKSDFACANAFNNSIIPEDTFFPSPESSCDVKLVEKSFETDTNLNFQNLSVIGFRILLLKVAGFNLLMTLRLWS

SEQ ID NO: 776 - protein, 307 aa, Homo sapiens
MGFRLLCCVAFCLLGAGPVDSGVTQTPKHLITATGQRVTLRCSPRSGDLSVYWYQQSLDQGLQFLIQYYNGEERAKGNILERFSAQQFPDLHSELNLSSLELGDSALYFCASSAGGGGYTFGSGTRLTVVEDLNKVFPPEVAVFEPSEAEISHTQKATLVCLATGFFPDHVELSWWVNGKEVHSGVSTDPQPLKEQPALNDSRYCLSSRLRVSATFWQNPRNHFRCQVQFYGLSENDEWTQDRAKPVTQIVSAEAWGRADCGFTSVSYQQGVLSATILYEILLGKATLYAVLVSALVLMAMVKRKDF

SEQ ID NO: 777 - protein, 271 aa, Homo sapiens
METLLGLLILWLQLQWVSSKQEVTQIPAALSVPEGENLVLNCSFTDSAIYNLQWFRQDPGKGLTSLLLIQSSQREQTSGRLNASLDKSSGRSTLYIAASQPGDSATYLCAVRMRRDDKIIFGKGTRLHILPNIQNPDPAVYQLRDSKSSDKSVCLFTDFDSQTNVSQSKDSDVYITDKTVLDMRSMDFKSNSAVAWSNKSDFACANAFNNSIIPEDTFFPSPESSCDVKLVEKSFETDTNLNFQNLSVIGFRILLLKVAGFNLLMTLRLWS

SEQ ID NO: 778 - protein, 314 aa, Homo sapiens
MGFRLLCCVAFCLLGAGPVDSGVTQTPKHLITATGQRVTLRCSPRSGDLSVYWYQQSLDQGLQFLIQYYNGEERAKGNILERFSAQQFPDLHSELNLSSLELGDSALYFCASSVWELAVDTDTQYFGPGTRLTVLEDLKNVFPPEVAVFEPSEAEISHTQKATLVCLATGFYPDHVELSWWVNGKEVHSGVSTDPQPLKEQPALNDSRYCLSSRLRVSATFWQNPRNHFRCQVQFYGLSENDEWTQDRAKPVTQIVSAEAWGRADCGFTSESYQQGVLSATILYEILLGKATLYAVLVSALVLMAMVKRKDSRG

SEQ ID NO: 779 - protein, 277 aa, Homo sapiens
MAMLLGASVLILWLQPDWVNSQQKNDDQQVKQNSPSLSVQEGRISILNCDYTNSMFDYFLWYKKYPAEGPTFLISISSIKDKNEDGRFTVFLNKSAKHLSLHIVPSQPGDSAVYFCAASIDGNKLVFGAGTILRVKSYIQNPDPAVYQLRDSKSSDKSVCLFTDFDSQTNVSQSKDSDVYITDKTVLDMRSMDFKSNSAVAWSNKSDFACANAFNNSIIPEDTFFPSPESSCDVKLVEKSFETDTNLNFQNLSVIGFRILLLKVAGFNLLMTLRLWS

SEQ ID NO: 780 - protein, 311 aa, Homo sapiens
MGPGLLCWALLCLLGAGLVDAGVTQSPTHLIKTRGQQVTLRCSPKSGHDTVSWYQQALGQGPQFIFQYYEEEERQRGNFPDRFSGHQFPNYSSELNVNALLLGDSALYLCASSFTPGPVNTEAFFGQGTRLTVVEDLNKVFPPEVAVFEPSEAEISHTQKATLVCLATGFFPDHVELSWWVNGKEVHSGVSTDPQPLKEQPALNDSRYCLSSRLRVSATFWQNPRNHFRCQVQFYGLSENDEWTQDRAKPVTQIVSAEAWGRADCGFTSVSYQQGVLSATILYEILLGKATLYAVLVSALVLMAMVKRKDF

SEQ ID NO: 781 - protein, 272 aa, Homo sapiens
MKTFAGFSFLFLWLQLDCMSRGEDVEQSLFLSVREGDSSVINCTYTDSSSTYLYWYKQEPGAGLQLLTYIFSNMDMKQDQRLTVLLNKKDKHLSLRIADTQTGDSAIYFCAESAGGYNKLIFGAGTRLAVHPYIQNPDPAVYQLRDSKSSDKSVCLFTDFDSQTNVSQSKDSDVYITDKTVLDMRSMDFKSNSAVAWSNKSDFACANAFNNSIIPEDTFFPSPESSCDVKLVEKSFETDTNLNFQNLSVIGFRILLLKVAGFNLLMTLRLWS

SEQ ID NO: 782 - protein, 313 aa, Homo sapiens
MGPQLLGYVVLCLLGAGPLEAQVTQNPRYLITVTGKKLTVTCSQNMNHEYMSWYRQDPGLGLRQIYYSMNVEVTDKGDVPEGYKVSRKEKRNFPLILESPSPNQTSLYFCASSSDPGTSVYEQYFGPGTRLTVTEDLKNVFPPEVAVFEPSEAEISHTQKATLVCLATGFYPDHVELSWWVNGKEVHSGVSTDPQPLKEQPALNDSRYCLSSRLRVSATFWQNPRNHFRCQVQFYGLSENDEWTQDRAKPVTQIVSAEAWGRADCGFTSESYQQGVLSATILYEILLGKATLYAVLVSALVLMAMVKRKDSRG

SEQ ID NO: 783 - protein, 270 aa, Homo sapiens
MLLEHLLIILWMQLTWVSGQQLNQSPQSMFIQEGEDVSMNCTSSSIFNTWLWYKQEPGEGPVLLIALYKAGELTSNGRLTAQFGITRKDSFLNISASIPSDVGIYFCAGLFLNTGNQFYFGTGTSLTVIPNIQNPDPAVYQLRDSKSSDKSVCLFTDFDSQTNVSQSKDSDVYITDKTVLDMRSMDFKSNSAVAWSNKSDFACANAFNNSIIPEDTFFPSPESSCDVKLVEKSFETDTNLNFQNLSVIGFRILLLKVAGFNLLMTLRLWS

SEQ ID NO: 784 - protein, 311 aa, Homo sapiens
MGPQLLGYVVLCLLGAGPLEAQVTQNPRYLITVTGKKLTVTCSQNMNHEYMSWYRQDPGLGLRQIYYSMNVEVTDKGDVPEGYKVSRKEKRNFPLILESPSPNQTSLYFCASTDRGPTDTQYFGPGTRLTVLEDLKNVFPPEVAVFEPSEAEISHTQKATLVCLATGFYPDHVELSWWVNGKEVHSGVSTDPQPLKEQPALNDSRYCLSSRLRVSATFWQNPRNHFRCQVQFYGLSENDEWTQDRAKPVTQIVSAEAWGRADCGFTSESYQQGVLSATILYEILLGKATLYAVLVSALVLMAMVKRKDSRG

SEQ ID NO: 785 - protein, 268 aa, Homo sapiens
MLLEHLLIILWMQLTWVSGQQLNQSPQSMFIQEGEDVSMNCTSSSIFNTWLWYKQEPGEGPVLLIALYKAGELTSNGRLTAQFGITRKDSFLNISASIPSDVGIYFCAGQPNGNQFYFGTGTSLTVIPNIQNPDPAVYQLRDSKSSDKSVCLFTDFDSQTNVSQSKDSDVYITDKTVLDMRSMDFKSNSAVAWSNKSDFACANAFNNSIIPEDTFFPSPESSCDVKLVEKSFETDTNLNFQNLSVIGFRILLLKVAGFNLLMTLRLWS

SEQ ID NO: 786 - protein, 311 aa, Homo sapiens
MGPQLLGYVVLCLLGAGPLEAQVTQNPRYLITVTGKKLTVTCSQNMNHEYMSWYRQDPGLGLRQIYYSMNVEVTDKGDVPEGYKVSRKEKRNFPLILESPSPNQTSLYFCASSSRDSTYEQYFGPGTRLTVTEDLKNVFPPEVAVFEPSEAEISHTQKATLVCLATGFYPDHVELSWWVNGKEVHSGVSTDPQPLKEQPALNDSRYCLSSRLRVSATFWQNPRNHFRCQVQFYGLSENDEWTQDRAKPVTQIVSAEAWGRADCGFTSESYQQGVLSATILYEILLGKATLYAVLVSALVLMAMVKRKDSRG

SEQ ID NO: 787 - protein, 275 aa, Homo sapiens
MSLSSLLKVVTASLWLGPGIAQKITQTQPGMFVQEKEAVTLDCTYDTSDPSYGLFWYKQPSSGEMIFLIYQGSYDQQNATEGRYSLNFQKARKSANLVISASQLGDSAMYFCAMRDASLDDKIIFGKGTRLHILPNIQNPDPAVYQLRDSKSSDKSVCLFTDFDSQTNVSQSKDSDVYITDKTVLDMRSMDFKSNSAVAWSNKSDFACANAFNNSIIPEDTFFPSPESSCDVKLVEKSFETDTNLNFQNLSVIGFRILLLKVAGFNLLMTLRLWS

SEQ ID NO: 788 - protein, 311 aa, Homo sapiens
MGPQLLGYVVLCLLGAGPLEAQVTQNPRYLITVTGKKLTVTCSQNMNHEYMSWYRQDPGLGLRQIYYSMNVEVTDKGDVPEGYKVSRKEKRNFPLILESPSPNQTSLYFCASSLRTSTDTQYFGPGTRLTVLEDLKNVFPPEVAVFEPSEAEISHTQKATLVCLATGFYPDHVELSWWVNGKEVHSGVSTDPQPLKEQPALNDSRYCLSSRLRVSATFWQNPRNHFRCQVQFYGLSENDEWTQDRAKPVTQIVSAEAWGRADCGFTSESYQQGVLSATILYEILLGKATLYAVLVSALVLMAMVKRKDSRG

SEQ ID NO: 789 - protein, 271 aa, Homo sapiens
MALQSTLGAVWLGLLLNSLWKVAESKDQVFQPSTVASSEGAVVEIFCNHSVSNAYNFFWYLHFPGCAPRLLVKGSKPSQQGRYNMTYERFSSSLLILQVREADAAVYYCAVEEGSNYQLIWGAGTKLIIKPDIQNPDPAVYQLRDSKSSDKSVCLFTDFDSQTNVSQSKDSDVYITDKTVLDMRSMDFKSNSAVAWSNKSDFACANAFNNSIIPEDTFFPSPESSCDVKLVEKSFETDTNLNFQNLSVIGFRILLLKVAGFNLLMTLRLWS

SEQ ID NO: 790 - protein, 311 aa, Homo sapiens
MGPQLLGYVVLCLLGAGPLEAQVTQNPRYLITVTGKKLTVTCSQNMNHEYMSWYRQDPGLGLRQIYYSMNVEVTDKGDVPEGYKVSRKEKRNFPLILESPSPNQTSLYFCASGDRDGSDTQYFGPGTRLTVLEDLKNVFPPEVAVFEPSEAEISHTQKATLVCLATGFYPDHVELSWWVNGKEVHSGVSTDPQPLKEQPALNDSRYCLSSRLRVSATFWQNPRNHFRCQVQFYGLSENDEWTQDRAKPVTQIVSAEAWGRADCGFTSESYQQGVLSATILYEILLGKATLYAVLVSALVLMAMVKRKDSRG

SEQ ID NO: 791 - protein, 272 aa, Homo sapiens
MMKSLRVLLVILWLQLSWVWSQQKEVEQDPGPLSVPEGAIVSLNCTYSNSAFQYFMWYRQYSRKGPELLMYTYSSGNKEDGRFTAQVDKSSKYISLFIRDSQPSDSATYLCAPTNTDKLIFGTGTRLQVFPNIIQNPDPAVYQLRDSKSSDKSVCLFTDFDSQTNVSQSKDSDVYITDKTVLDMRSMDFKSNSAVAWSNKSDFACANAFNNSIIPEDTFFPSPESSCDVKLVEKSFETDTNLNFQNLSVIGFRILLLKVAGFNLLMTLRLWS

SEQ ID NO: 792 - protein, 311 aa, Homo sapiens
MSIGLLCCAALSLLWAGPVNAGVTQTPKFQVLKTGQSMTLQCAQDMNHEYMSWYRQDPGMGLRLIHYSVGAGITDQGEVPNGYNVSRSTTEDFPLRLLSAAPSQTSVYFCASSYMGDQETQYFGPGTRLLVLEDLKNVFPPEVAVFEPSEAEISHTQKATLVCLATGFYPDHVELSWWVNGKEVHSGVSTDPQPLKEQPALNDSRYCLSSRLRVSATFWQNPRNHFRCQVQFYGLSENDEWTQDRAKPVTQIVSAEAWGRADCGFTSESYQQGVLSATILYEILLGKATLYAVLVSALVLMAMVKRKDSRG

SEQ ID NO: 793 - protein, 270 aa, Homo sapiens
MNYSPGLVSLILLLLGRTRGNSVTQMEGPVTLSEEAFLTINCTYTATGYPSLFWYVQYPGEGLQLLLKATKADDKGSNKGFEATYRKETTSFHLEKGSVQVSDSAVYFCALSGNTGKLIFGQGTTLQVKPDIQNPDPAVYQLRDSKSSDKSVCLFTDFDSQTNVSQSKDSDVYITDKTVLDMRSMDFKSNSAVAWSNKSDFACANAFNNSIIPEDTFFPSPESSCDVKLVEKSFETDTNLNFQNLSVIGFRILLLKVAGFNLLMTLRLWS

SEQ ID NO: 794 - protein, 311 aa, Homo sapiens
MGPQLLGYVVLCLLGAGPLEAQVTQNPRYLITVTGKKLTVTCSQNMNHEYMSWYRQDPGLGLRQIYYSMNVEVTDKGDVPEGYKVSRKEKRNFPLILESPSPNQTSLYFCASSWRYGGDEQYFGPGTRLTVTEDLKNVFPPEVAVFEPSEAEISHTQKATLVCLATGFYPDHVELSWWVNGKEVHSGVSTDPQPLKEQPALNDSRYCLSSRLRVSATFWQNPRNHFRCQVQFYGLSENDEWTQDRAKPVTQIVSAEAWGRADCGFTSESYQQGVLSATILYEILLGKATLYAVLVSALVLMAMVKRKDSRG

SEQ ID NO: 795 - protein, 269 aa, Homo sapiens
MLLEHLLIILWMQLTWVSGQQLNQSPQSMFIQEGEDVSMNCTSSSIFNTWLWYKQEPGEGPVLLIALYKAGELTSNGRLTAQFGITRKDSFLNISASIPSDVGIYFCAGQGNTGNQFYFGTGTSLTVIPNIQNPDPAVYQLRDSKSSDKSVCLFTDFDSQTNVSQSKDSDVYITDKTVLDMRSMDFKSNSAVAWSNKSDFACANAFNNSIIPEDTFFPSPESSCDVKLVEKSFETDTNLNFQNLSVIGFRILLLKVAGFNLLMTLRLWS

SEQ ID NO: 796 - protein, 311 aa, Homo sapiens
MGPQLLGYVVLCLLGAGPLEAQVTQNPRYLITVTGKKLTVTCSQNMNHEYMSWYRQDPGLGLRQIYYSMNVEVTDKGDVPEGYKVSRKEKRNFPLILESPSPNQTSLYFCASSLSAPQETQYFGPGTRLLVLEDLKNVFPPEVAVFEPSEAEISHTQKATLVCLATGFYPDHVELSWWVNGKEVHSGVSTDPQPLKEQPALNDSRYCLSSRLRVSATFWQNPRNHFRCQVQFYGLSENDEWTQDRAKPVTQIVSAEAWGRADCGFTSESYQQGVLSATILYEILLGKATLYAVLVSALVLMAMVKRKDSRG

SEQ ID NO: 797 - protein, 269 aa, Homo sapiens
MNYSPGLVSLILLLLGRTRGNSVTQMEGPVTLSEEAFLTINCTYTATGYPSLFWYVQYPGEGLQLLLKATKADDKGSNKGFEATYRKETTSFHLEKGSVQVSDSAVYFCALIGGNQFYFGTGTSLTVIPNIQNPDPAVYQLRDSKSSDKSVCLFTDFDSQTNVSQSKDSDVYITDKTVLDMRSMDFKSNSAVAWSNKSDFACANAFNNSIIPEDTFFPSPESSCDVKLVEKSFETDTNLNFQNLSVIGFRILLLKVAGFNLLMTLRLWS

SEQ ID NO: 798 - protein, 310 aa, Homo sapiens
MGPQLLGYVVLCLLGAGPLEAQVTQNPRYLITVTGKKLTVTCSQNMNHEYMSWYRQDPGLGLRQIYYSMNVEVTDKGDVPEGYKVSRKEKRNFPLILESPSPNQTSLYFCASSDRAPYEQYFGPGTRLTVTEDLKNVFPPEVAVFEPSEAEISHTQKATLVCLATGFYPDHVELSWWVNGKEVHSGVSTDPQPLKEQPALNDSRYCLSSRLRVSATFWQNPRNHFRCQVQFYGLSENDEWTQDRAKPVTQIVSAEAWGRADCGFTSESYQQGVLSATILYEILLGKATLYAVLVSALVLMAMVKRKDSRG

SEQ ID NO: 799 - protein, 274 aa, Homo sapiens
MTRVSLLWAVVVSTCLESGMAQTVTQSQPEMSVQEAETVTLSCTYDTSENNYYLFWYKQPPSRQMILVIRQEAYKQQNATENRFSVNFQKAAKSFSLKISDSQLGDTAMYFCASTFSGYSTLTFGKGTMLLVSPDIQNPDPAVYQLRDSKSSDKSVCLFTDFDSQTNVSQSKDSDVYITDKTVLDMRSMDFKSNSAVAWSNKSDFACANAFNNSIIPEDTFFPSPESSCDVKLVEKSFETDTNLNFQNLSVIGFRILLLKVAGFNLLMTLRLWS

SEQ ID NO: 800 - protein, 314 aa, Homo sapiens
MDTRVLCCAVICLLGAGLSNAGVMQNPRHLVRRRGQEARLRCSPMKGHSHVYWYRQLPEEGLKFMVYLQKENIIDESGMPKERFSAEFPKEGPSILRIQQVVRGDSAAYFCASSSGGYGPQETQYFGPGTRLLVLEDLKNVFPPEVAVFEPSEAEISHTQKATLVCLATGFYPDHVELSWWVNGKEVHSGVSTDPQPLKEQPALNDSRYCLSSRLRVSATFWQNPRNHFRCQVQFYGLSENDEWTQDRAKPVTQIVSAEAWGRADCGFTSESYQQGVLSATILYEILLGKATLYAVLVSALVLMAMVKRKDSRG

SEQ ID NO: 801 - protein, 278 aa, Homo sapiens
MAMLLGASVLILWLQPDWVNSQQKNDDQQVKQNSPSLSVQEGRISILNCDYTNSMFDYFLWYKKYPAEGPTFLISISSIKDKNEDGRFTVFLNKSAKHLSLHIVPSQPGDSAVYFCAASPGTASKLTFGTGTRLQVTLDIQNPDPAVYQLRDSKSSDKSVCLFTDFDSQTNVSQSKDSDVYITDKTVLDMRSMDFKSNSAVAWSNKSDFACANAFNNSIIPEDTFFPSPESSCDVKLVEKSFETDTNLNFQNLSVIGFRILLLKVAGFNLLMTLRLWS

SEQ ID NO: 802 - protein, 323 aa, Homo sapiens
MLSPDLPDSAWNTRLLCHVMLCLLGAVSVAAGVIQSPRHLIKEKRETATLKCYPIPRHDTVYWYQQGPGQDPQFLISFYEKMQSDKGSIPDRFSAQQFSDYHSELNMSSLELGDSALYFCASSSDWGGGTDTQYFGPGTRLTVLEDLKNVFPPEVAVFEPSEAEISHTQKATLVCLATGFYPDHVELSWWVNGKEVHSGVSTDPQPLKEQPALNDSRYCLSSRLRVSATFWQNPRNHFRCQVQFYGLSENDEWTQDRAKPVTQIVSAEAWGRADCGFTSESYQQGVLSATILYEILLGKATLYAVLVSALVLMAMVKRKDSRG

SEQ ID NO: 803 - protein, 270 aa, Homo sapiens
MNYSPGLVSLILLLLGRTRGNSVTQMEGPVTLSEEAFLTINCTYTATGYPSLFWYVQYPGEGLQLLLKATKADDKGSNKGFEATYRKETTSFHLEKGSVQVSDSAVYFCAIGGSQGNLIFGKGTKLSVKPNIQNPDPAVYQLRDSKSSDKSVCLFTDFDSQTNVSQSKDSDVYITDKTVLDMRSMDFKSNSAVAWSNKSDFACANAFNNSIIPEDTFFPSPESSCDVKLVEKSFETDTNLNFQNLSVIGFRILLLKVAGFNLLMTLRLWS

SEQ ID NO: 804 - protein, 311 aa, Homo sapiens
MGPQLLGYVVLCLLGAGPLEAQVTQNPRYLITVTGKKLTVTCSQNMNHEYMSWYRQDPGLGLRQIYYSMNVEVTDKGDVPEGYKVSRKEKRNFPLILESPSPNQTSLYFCASSLRSGSDEQFFGPGTRLTVLEDLKNVFPPEVAVFEPSEAEISHTQKATLVCLATGFYPDHVELSWWVNGKEVHSGVSTDPQPLKEQPALNDSRYCLSSRLRVSATFWQNPRNHFRCQVQFYGLSENDEWTQDRAKPVTQIVSAEAWGRADCGFTSESYQQGVLSATILYEILLGKATLYAVLVSALVLMAMVKRKDSRG

SEQ ID NO: 805 - protein, 270 aa, Homo sapiens
MNYSPGLVSLILLLLGRTRGNSVTQMEGPVTLSEEAFLTINCTYTATGYPSLFWYVQYPGEGLQLLLKATKADDKGSNKGFEATYRKETTSFHLEKGSVQVSDSAVYFCALSGSQGNLIFGKGTKLSVKPNIQNPDPAVYQLRDSKSSDKSVCLFTDFDSQTNVSQSKDSDVYITDKTVLDMRSMDFKSNSAVAWSNKSDFACANAFNNSIIPEDTFFPSPESSCDVKLVEKSFETDTNLNFQNLSVIGFRILLLKVAGFNLLMTLRLWS

SEQ ID NO: 806 - protein, 269 aa, Homo sapiens
MNYSPGLVSLILLLLGRTRGNSVTQMEGPVTLSEEAFLTINCTYTATGYPSLFWYVQYPGEGLQLLLKATKADDKGSNKGFEATYRKETTSFHLEKGSVQVSDSAVYFCAENTGNQFYFGTGTSLTVIPNIQNPDPAVYQLRDSKSSDKSVCLFTDFDSQTNVSQSKDSDVYITDKTVLDMRSMDFKSNSAVAWSNKSDFACANAFNNSIIPEDTFFPSPESSCDVKLVEKSFETDTNLNFQNLSVIGFRILLLKVAGFNLLMTLRLWS

SEQ ID NO: 807 - protein, 311 aa, Homo sapiens
MGPQLLGYVVLCLLGAGPLEAQVTQNPRYLITVTGKKLTVTCSQNMNHEYMSWYRQDPGLGLRQIYYSMNVEVTDKGDVPEGYKVSRKEKRNFPLILESPSPNQTSLYFCASSPSHSTDTQYFGPGTRLTVLEDLKNVFPPEVAVFEPSEAEISHTQKATLVCLATGFYPDHVELSWWVNGKEVHSGVSTDPQPLKEQPALNDSRYCLSSRLRVSATFWQNPRNHFRCQVQFYGLSENDEWTQDRAKPVTQIVSAEAWGRADCGFTSESYQQGVLSATILYEILLGKATLYAVLVSALVLMAMVKRKDSRG

SEQ ID NO: 808 - protein, 269 aa, Homo sapiens
MNYSPGLVSLILLLLGRTRGNSVTQMEGPVTLSEEAFLTINCTYTATGYPSLFWYVQYPGEGLQLLLKATKADDKGSNKGFEATYRKETTSFHLEKGSVQVSDSAVYFCALSELNDMRFGAGTRLTVKPNIQNPDPAVYQLRDSKSSDKSVCLFTDFDSQTNVSQSKDSDVYITDKTVLDMRSMDFKSNSAVAWSNKSDFACANAFNNSIIPEDTFFPSPESSCDVKLVEKSFETDTNLNFQNLSVIGFRILLLKVAGFNLLMTLRLWS

SEQ ID NO: 809 - protein, 312 aa, Homo sapiens
MGPQLLGYVVLCLLGAGPLEAQVTQNPRYLITVTGKKLTVTCSQNMNHEYMSWYRQDPGLGLRQIYYSMNVEVTDKGDVPEGYKVSRKEKRNFPLILESPSPNQTSLYFCASSLTHSSYNEQFFGPGTRLTVLEDLKNVFPPEVAVFEPSEAEISHTQKATLVCLATGFYPDHVELSWWVNGKEVHSGVSTDPQPLKEQPALNDSRYCLSSRLRVSATFWQNPRNHFRCQVQFYGLSENDEWTQDRAKPVTQIVSAEAWGRADCGFTSESYQQGVLSATILYEILLGKATLYAVLVSALVLMAMVKRKDSRG

SEQ ID NO: 810 - protein, 272 aa, Homo sapiens
METLLGLLILWLQLQWVSSKQEVTQIPAALSVPEGENLVLNCSFTDSAIYNLQWFRQDPGKGLTSLLLIQSSQREQTSGRLNASLDKSSGRSTLYIAASQPGDSATYLCAVMDEDSSYKLIFGSGTRLLVRPDIQNPDPAVYQLRDSKSSDKSVCLFTDFDSQTNVSQSKDSDVYITDKTVLDMRSMDFKSNSAVAWSNKSDFACANAFNNSIIPEDTFFPSPESSCDVKLVEKSFETDTNLNFQNLSVIGFRILLLKVAGFNLLMTLRLWS

SEQ ID NO: 811 - protein, 308 aa, Homo sapiens
MGPQLLGYVVLCLLGAGPLEAQVTQNPRYLITVTGKKLTVTCSQNMNHEYMSWYRQDPGLGLRQIYYSMNVEVTDKGDVPEGYKVSRKEKRNFPLILESPSPNQTSLYFCASSLMTGYGYTFGSGTRLTVVEDLNKVFPPEVAVFEPSEAEISHTQKATLVCLATGFFPDHVELSWWVNGKEVHSGVSTDPQPLKEQPALNDSRYCLSSRLRVSATFWQNPRNHFRCQVQFYGLSENDEWTQDRAKPVTQIVSAEAWGRADCGFTSVSYQQGVLSATILYEILLGKATLYAVLVSALVLMAMVKRKDF

SEQ ID NO: 812 - protein, 272 aa, Homo sapiens
MMKSLRVLLVILWLQLSWVWSQQKEVEQDPGPLSVPEGAIVSLNCTYSNSAFQYFMWYRQYSRKGPELLMYTYSSGNKEDGRFTAQVDKSSKYISLFIRDSQPSDSATYLCAMGYTGNQFYFGTGTSLTVIPNIQNPDPAVYQLRDSKSSDKSVCLFTDFDSQTNVSQSKDSDVYITDKTVLDMRSMDFKSNSAVAWSNKSDFACANAFNNSIIPEDTFFPSPESSCDVKLVEKSFETDTNLNFQNLSVIGFRILLLKVAGFNLLMTLRLWS

SEQ ID NO: 813 - protein, 309 aa, Homo sapiens
MSLGLLCCGAFSLLWAGPVNAGVTQTPKFRVLKTGQSMTLLCAQDMNHEYMYWYRQDPGMGLRLIHYSVGEGTTAKGEVPDGYNVSRLKKQNFLLGLESAAPSQTSVYFCASINGHDEQFFGPGTRLTVLEDLKNVFPPEVAVFEPSEAEISHTQKATLVCLATGFYPDHVELSWWVNGKEVHSGVSTDPQPLKEQPALNDSRYCLSSRLRVSATFWQNPRNHFRCQVQFYGLSENDEWTQDRAKPVTQIVSAEAWGRADCGFTSESYQQGVLSATILYEILLGKATLYAVLVSALVLMAMVKRKDSRG

SEQ ID NO: 814 - protein, 269 aa, Homo sapiens
MNYSPGLVSLILLLLGRTRGNSVTQMEGPVTLSEEAFLTINCTYTATGYPSLFWYVQYPGEGLQLLLKATKADDKGSNKGFEATYRKETTSFHLEKGSVQVSDSAVYFCALSDRNDMRFGAGTRLTVKPNIQNPDPAVYQLRDSKSSDKSVCLFTDFDSQTNVSQSKDSDVYITDKTVLDMRSMDFKSNSAVAWSNKSDFACANAFNNSIIPEDTFFPSPESSCDVKLVEKSFETDTNLNFQNLSVIGFRILLLKVAGFNLLMTLRLWS

SEQ ID NO: 815 - protein, 311 aa, Homo sapiens
MGPQLLGYVVLCLLGAGPLEAQVTQNPRYLITVTGKKLTVTCSQNMNHEYMSWYRQDPGLGLRQIYYSMNVEVTDKGDVPEGYKVSRKEKRNFPLILESPSPNQTSLYFCASSPRDFLDEQFFGPGTRLTVLEDLKNVFPPEVAVFEPSEAEISHTQKATLVCLATGFYPDHVELSWWVNGKEVHSGVSTDPQPLKEQPALNDSRYCLSSRLRVSATFWQNPRNHFRCQVQFYGLSENDEWTQDRAKPVTQIVSAEAWGRADCGFTSESYQQGVLSATILYEILLGKATLYAVLVSALVLMAMVKRKDSRG

SEQ ID NO: 816 - protein, 271 aa, Homo sapiens
MLLLLVPVLEVIFTLGGTRAQSVTQLGSHVSVSEGALVLLRCNYSSSVPPYLFWYVQYPNQGLQLLLKYTSAATLVKGINGFEAEFKKSETSFHLTKPSAHMSDAAEYFCAVSGRGNQFYFGTGTSLTVIPNIQNPDPAVYQLRDSKSSDKSVCLFTDFDSQTNVSQSKDSDVYITDKTVLDMRSMDFKSNSAVAWSNKSDFACANAFNNSIIPEDTFFPSPESSCDVKLVEKSFETDTNLNFQNLSVIGFRILLLKVAGFNLLMTLRLWS

SEQ ID NO: 817 - protein, 312 aa, Homo sapiens
MGPQLLGYVVLCLLGAGPLEAQVTQNPRYLITVTGKKLTVTCSQNMNHEYMSWYRQDPGLGLRQIYYSMNVEVTDKGDVPEGYKVSRKEKRNFPLILESPSPNQTSLYFCASSPSSGIYNEQFFGPGTRLTVLEDLKNVFPPEVAVFEPSEAEISHTQKATLVCLATGFYPDHVELSWWVNGKEVHSGVSTDPQPLKEQPALNDSRYCLSSRLRVSATFWQNPRNHFRCQVQFYGLSENDEWTQDRAKPVTQIVSAEAWGRADCGFTSESYQQGVLSATILYEILLGKATLYAVLVSALVLMAMVKRKDSRG

SEQ ID NO: 818 - protein, 271 aa, Homo sapiens
MNYSPGLVSLILLLLGRTRGNSVTQMEGPVTLSEEAFLTINCTYTATGYPSLFWYVQYPGEGLQLLLKATKADDKGSNKGFEATYRKETTSFHLEKGSVQVSDSAVYFCAFIYNFNKFYFGSGTKLNVKPNIIQNPDPAVYQLRDSKSSDKSVCLFTDFDSQTNVSQSKDSDVYITDKTVLDMRSMDFKSNSAVAWSNKSDFACANAFNNSIIPEDTFFPSPESSCDVKLVEKSFETDTNLNFQNLSVIGFRILLLKVAGFNLLMTLRLWS

SEQ ID NO: 819 - protein, 312 aa, Homo sapiens
MGIRLLCRVAFCFLAVGLVDVKVTQSSRYLVKRTGEKVFLECVQDMDHENMFWYRQDPGLGLRLIYFSYDVKMKEKGDIPEGYSVSREKKERFSLILESASTNQTSMYLCASSFEAGSGYEQYFGPGTRLTVTEDLKNVFPPEVAVFEPSEAEISHTQKATLVCLATGFYPDHVELSWWVNGKEVHSGVSTDPQPLKEQPALNDSRYCLSSRLRVSATFWQNPRNHFRCQVQFYGLSENDEWTQDRAKPVTQIVSAEAWGRADCGFTSESYQQGVLSATILYEILLGKATLYAVLVSALVLMAMVKRKDSRG

SEQ ID NO: 820 - protein, 271 aa, Homo sapiens
MNYSPGLVSLILLLLGRTRGNSVTQMEGPVTLSEEAFLTINCTYTATGYPSLFWYVQYPGEGLQLLLKATKADDKGSNKGFEATYRKETTSFHLEKGSVQVSDSAVYFCALRYNFNKFYFGSGTKLNVKPNIIQNPDPAVYQLRDSKSSDKSVCLFTDFDSQTNVSQSKDSDVYITDKTVLDMRSMDFKSNSAVAWSNKSDFACANAFNNSIIPEDTFFPSPESSCDVKLVEKSFETDTNLNFQNLSVIGFRILLLKVAGFNLLMTLRLWS

SEQ ID NO: 821 - protein, 311 aa, Homo sapiens
MSIGLLCCAALSLLWAGPVNAGVTQTPKFQVLKTGQSMTLQCAQDMNHEYMSWYRQDPGMGLRLIHYSVGAGITDQGEVPNGYNVSRSTTEDFPLRLLSAAPSQTSVYFCASGGGDLQETQYFGPGTRLLVLEDLKNVFPPEVAVFEPSEAEISHTQKATLVCLATGFYPDHVELSWWVNGKEVHSGVSTDPQPLKEQPALNDSRYCLSSRLRVSATFWQNPRNHFRCQVQFYGLSENDEWTQDRAKPVTQIVSAEAWGRADCGFTSESYQQGVLSATILYEILLGKATLYAVLVSALVLMAMVKRKDSRG

SEQ ID NO: 822 - protein, 277 aa, Homo sapiens
MAMLLGASVLILWLQPDWVNSQQKNDDQQVKQNSPSLSVQEGRISILNCDYTNSMFDYFLWYKKYPAEGPTFLISISSIKDKNEDGRFTVFLNKSAKHLSLHIVPSQPGDSAVYFCAASDYGQNFVFGPGTRLSVLPYIQNPDPAVYQLRDSKSSDKSVCLFTDFDSQTNVSQSKDSDVYITDKTVLDMRSMDFKSNSAVAWSNKSDFACANAFNNSIIPEDTFFPSPESSCDVKLVEKSFETDTNLNFQNLSVIGFRILLLKVAGFNLLMTLRLWS

SEQ ID NO: 823 - protein, 311 aa, Homo sapiens
MGPQLLGYVVLCLLGAGPLEAQVTQNPRYLITVTGKKLTVTCSQNMNHEYMSWYRQDPGLGLRQIYYSMNVEVTDKGDVPEGYKVSRKEKRNFPLILESPSPNQTSLYFCASSNRDSLNEQFFGPGTRLTVLEDLKNVFPPEVAVFEPSEAEISHTQKATLVCLATGFYPDHVELSWWVNGKEVHSGVSTDPQPLKEQPALNDSRYCLSSRLRVSATFWQNPRNHFRCQVQFYGLSENDEWTQDRAKPVTQIVSAEAWGRADCGFTSESYQQGVLSATILYEILLGKATLYAVLVSALVLMAMVKRKDSRG

SEQ ID NO: 824 - protein, 271 aa, Homo sapiens
MNYSPGLVSLILLLLGRTRGNSVTQMEGPVTLSEEAFLTINCTYTATGYPSLFWYVQYPGEGLQLLLKATKADDKGSNKGFEATYRKETTSFHLEKGSVQVSDSAVYFCALQGNQGGKLIFGQGTELSVKPNIQNPDPAVYQLRDSKSSDKSVCLFTDFDSQTNVSQSKDSDVYITDKTVLDMRSMDFKSNSAVAWSNKSDFACANAFNNSIIPEDTFFPSPESSCDVKLVEKSFETDTNLNFQNLSVIGFRILLLKVAGFNLLMTLRLWS

SEQ ID NO: 825 - protein, 311 aa, Homo sapiens
MGPQLLGYVVLCLLGAGPLEAQVTQNPRYLITVTGKKLTVTCSQNMNHEYMSWYRQDPGLGLRQIYYSMNVEVTDKGDVPEGYKVSRKEKRNFPLILESPSPNQTSLYFCASSYRDTGDEQFFGPGTRLTVLEDLKNVFPPEVAVFEPSEAEISHTQKATLVCLATGFYPDHVELSWWVNGKEVHSGVSTDPQPLKEQPALNDSRYCLSSRLRVSATFWQNPRNHFRCQVQFYGLSENDEWTQDRAKPVTQIVSAEAWGRADCGFTSESYQQGVLSATILYEILLGKATLYAVLVSALVLMAMVKRKDSRG

SEQ ID NO: 826 - protein, 271 aa, Homo sapiens
MLLITSMLVLWMQLSQVNGQQVMQIPQYQHVQEGEDFTTYCNSSTTLSNIQWYKQRPGGHPVFLIQLVKSGEVKKQKRLTFQFGEAKKNSSLHITATQTTDVGTYFCAGRPYFSDGQKLLFARGTMLKVDLNIQNPDPAVYQLRDSKSSDKSVCLFTDFDSQTNVSQSKDSDVYITDKTVLDMRSMDFKSNSAVAWSNKSDFACANAFNNSIIPEDTFFPSPESSCDVKLVEKSFETDTNLNFQNLSVIGFRILLLKVAGFNLLMTLRLWS

SEQ ID NO: 827 - protein, 312 aa, Homo sapiens
MSIGLLCCAALSLLWAGPVNAGVTQTPKFQVLKTGQSMTLQCAQDMNHEYMSWYRQDPGMGLRLIHYSVGAGITDQGEVPNGYNVSRSTTEDFPLRLLSAAPSQTSVYFCASSYSSGEYNEQFFGPGTRLTVLEDLKNVFPPEVAVFEPSEAEISHTQKATLVCLATGFYPDHVELSWWVNGKEVHSGVSTDPQPLKEQPALNDSRYCLSSRLRVSATFWQNPRNHFRCQVQFYGLSENDEWTQDRAKPVTQIVSAEAWGRADCGFTSESYQQGVLSATILYEILLGKATLYAVLVSALVLMAMVKRKDSRG

SEQ ID NO: 828 - protein, 270 aa, Homo sapiens
MNYSPGLVSLILLLLGRTRGNSVTQMEGPVTLSEEAFLTINCTYTATGYPSLFWYVQYPGEGLQLLLKATKADDKGSNKGFEATYRKETTSFHLEKGSVQVSDSAVYFCALARGQGNLIFGKGTKLSVKPNIQNPDPAVYQLRDSKSSDKSVCLFTDFDSQTNVSQSKDSDVYITDKTVLDMRSMDFKSNSAVAWSNKSDFACANAFNNSIIPEDTFFPSPESSCDVKLVEKSFETDTNLNFQNLSVIGFRILLLKVAGFNLLMTLRLWS

SEQ ID NO: 829 - protein, 311 aa, Homo sapiens
MGPQLLGYVVLCLLGAGPLEAQVTQNPRYLITVTGKKLTVTCSQNMNHEYMSWYRQDPGLGLRQIYYSMNVEVTDKGDVPEGYKVSRKEKRNFPLILESPSPNQTSLYFCASSLSSGFDEQFFGPGTRLTVLEDLKNVFPPEVAVFEPSEAEISHTQKATLVCLATGFYPDHVELSWWVNGKEVHSGVSTDPQPLKEQPALNDSRYCLSSRLRVSATFWQNPRNHFRCQVQFYGLSENDEWTQDRAKPVTQIVSAEAWGRADCGFTSESYQQGVLSATILYEILLGKATLYAVLVSALVLMAMVKRKDSRG

SEQ ID NO: 830 - protein, 275 aa, Homo sapiens
MLTASLLRAVIASICVVSSMAQKVTQAQTEISVVEKEDVTLDCVYETRDTTYYLFWYKQPPSGELVFLIRRNSFDEQNEISGRYSWNFQKSTSSFNFTITASQVVDSAVYFCALSEAYRDDKIIFGKGTRLHILPNIQNPDPAVYQLRDSKSSDKSVCLFTDFDSQTNVSQSKDSDVYITDKTVLDMRSMDFKSNSAVAWSNKSDFACANAFNNSIIPEDTFFPSPESSCDVKLVEKSFETDTNLNFQNLSVIGFRILLLKVAGFNLLMTLRLWS

SEQ ID NO: 831 - protein, 270 aa, Homo sapiens
MNYSPGLVSLILLLLGRTRGNSVTQMEGPVTLSEEAFLTINCTYTATGYPSLFWYVQYPGEGLQLLLKATKADDKGSNKGFEATYRKETTSFHLEKGSVQVSDSAVYFCALSDNTGKLIFGQGTTLQVKPDIQNPDPAVYQLRDSKSSDKSVCLFTDFDSQTNVSQSKDSDVYITDKTVLDMRSMDFKSNSAVAWSNKSDFACANAFNNSIIPEDTFFPSPESSCDVKLVEKSFETDTNLNFQNLSVIGFRILLLKVAGFNLLMTLRLWS

SEQ ID NO: 832 - protein, 314 aa, Homo sapiens
MSIGLLCCAALSLLWAGPVNAGVTQTPKFQVLKTGQSMTLQCAQDMNHEYMSWYRQDPGMGLRLIHYSVGAGITDQGEVPNGYNVSRSTTEDFPLRLLSAAPSQTSVYFCASSYPKNGSSYNEQFFGPGTRLTVLEDLKNVFPPEVAVFEPSEAEISHTQKATLVCLATGFYPDHVELSWWVNGKEVHSGVSTDPQPLKEQPALNDSRYCLSSRLRVSATFWQNPRNHFRCQVQFYGLSENDEWTQDRAKPVTQIVSAEAWGRADCGFTSESYQQGVLSATILYEILLGKATLYAVLVSALVLMAMVKRKDSRG

SEQ ID NO: 833 - protein, 271 aa, Homo sapiens
MNYSPGLVSLILLLLGRTRGNSVTQMEGPVTLSEEAFLTINCTYTATGYPSLFWYVQYPGEGLQLLLKATKADDKGSNKGFEATYRKETTSFHLEKGSVQVSDSAVYFCALSGGSQGNLIFGKGTKLSVKPNIQNPDPAVYQLRDSKSSDKSVCLFTDFDSQTNVSQSKDSDVYITDKTVLDMRSMDFKSNSAVAWSNKSDFACANAFNNSIIPEDTFFPSPESSCDVKLVEKSFETDTNLNFQNLSVIGFRILLLKVAGFNLLMTLRLWS

SEQ ID NO: 834 - protein, 311 aa, Homo sapiens
MGPQLLGYVVLCLLGAGPLEAQVTQNPRYLITVTGKKLTVTCSQNMNHEYMSWYRQDPGLGLRQIYYSMNVEVTDKGDVPEGYKVSRKEKRNFPLILESPSPNQTSLYFCASSEREGRNEQFFGPGTRLTVLEDLKNVFPPEVAVFEPSEAEISHTQKATLVCLATGFYPDHVELSWWVNGKEVHSGVSTDPQPLKEQPALNDSRYCLSSRLRVSATFWQNPRNHFRCQVQFYGLSENDEWTQDRAKPVTQIVSAEAWGRADCGFTSESYQQGVLSATILYEILLGKATLYAVLVSALVLMAMVKRKDSRG

SEQ ID NO: 835 - protein, 270 aa, Homo sapiens
MNYSPGLVSLILLLLGRTRGNSVTQMEGPVTLSEEAFLTINCTYTATGYPSLFWYVQYPGEGLQLLLKATKADDKGSNKGFEATYRKETTSFHLEKGSVQVSDSAVYFCALMGTGNQFYFGTGTSLTVIPNIQNPDPAVYQLRDSKSSDKSVCLFTDFDSQTNVSQSKDSDVYITDKTVLDMRSMDFKSNSAVAWSNKSDFACANAFNNSIIPEDTFFPSPESSCDVKLVEKSFETDTNLNFQNLSVIGFRILLLKVAGFNLLMTLRLWS

SEQ ID NO: 836 - protein, 309 aa, Homo sapiens
MGPQLLGYVVLCLLGAGPLEAQVTQNPRYLITVTGKKLTVTCSQNMNHEYMSWYRQDPGLGLRQIYYSMNVEVTDKGDVPEGYKVSRKEKRNFPLILESPSPNQTSLYFCASSFDSYEQYFGPGTRLTVTEDLKNVFPPEVAVFEPSEAEISHTQKATLVCLATGFYPDHVELSWWVNGKEVHSGVSTDPQPLKEQPALNDSRYCLSSRLRVSATFWQNPRNHFRCQVQFYGLSENDEWTQDRAKPVTQIVSAEAWGRADCGFTSESYQQGVLSATILYEILLGKATLYAVLVSALVLMAMVKRKDSRG

SEQ ID NO: 837 - protein, 280 aa, Homo sapiens
MAMLLGASVLILWLQPDWVNSQQKNDDQQVKQNSPSLSVQEGRISILNCDYTNSMFDYFLWYKKYPAEGPTFLISISSIKDKNEDGRFTVFLNKSAKHLSLHIVPSQPGDSAVYFCAASVGTGGYNKLIFGAGTRLAVHPYIQNPDPAVYQLRDSKSSDKSVCLFTDFDSQTNVSQSKDSDVYITDKTVLDMRSMDFKSNSAVAWSNKSDFACANAFNNSIIPEDTFFPSPESSCDVKLVEKSFETDTNLNFQNLSVIGFRILLLKVAGFNLLMTLRLWS

SEQ ID NO: 838 - protein, 309 aa, Homo sapiens
MSTRLLCWMALCLLGAELSEAEVAQSPRYKITEKSQAVAFWCDPISGHATLYWYRQILGQGPELLVQFQDESVVDDSQLPKDRFSAERLKGVDSTLKIQPAELGDSAMYLCASSAYENTEAFFGQGTRLTVVEDLNKVFPPEVAVFEPSEAEISHTQKATLVCLATGFFPDHVELSWWVNGKEVHSGVSTDPQPLKEQPALNDSRYCLSSRLRVSATFWQNPRNHFRCQVQFYGLSENDEWTQDRAKPVTQIVSAEAWGRADCGFTSVSYQQGVLSATILYEILLGKATLYAVLVSALVLMAMVKRKDF

SEQ ID NO: 839 - protein, 271 aa, Homo sapiens
MALQSTLGAVWLGLLLNSLWKVAESKDQVFQPSTVASSEGAVVEIFCNHSVSNAYNFFWYLHFPGCAPRLLVKGSKPSQQGRYNMTYERFSSSLLILQVREADAAVYYCAVFGNQGGKLIFGQGTELSVKPNIQNPDPAVYQLRDSKSSDKSVCLFTDFDSQTNVSQSKDSDVYITDKTVLDMRSMDFKSNSAVAWSNKSDFACANAFNNSIIPEDTFFPSPESSCDVKLVEKSFETDTNLNFQNLSVIGFRILLLKVAGFNLLMTLRLWS

SEQ ID NO: 840 - protein, 309 aa, Homo sapiens
MLSLLLLLLGLGSVFSAVISQKPSRDICQRGTSLTIQCQVDSQVTMMFWYRQQPGQSLTLIATANQGSEATYESGFVIDKFPISRPNLTFSTLTVSNMSPEDSSIYLCSAEGAGDSYEQYFGPGTRLTVTEDLKNVFPPEVAVFEPSEAEISHTQKATLVCLATGFYPDHVELSWWVNGKEVHSGVSTDPQPLKEQPALNDSRYCLSSRLRVSATFWQNPRNHFRCQVQFYGLSENDEWTQDRAKPVTQIVSAEAWGRADCGFTSESYQQGVLSATILYEILLGKATLYAVLVSALVLMAMVKRKDSRG

SEQ ID NO: 841 - protein, 273 aa, Homo sapiens
MEKNPLAAPLLILWFHLDCVSSILNVEQSPQSLHVQEGDSTNFTCSFPSSNFYALHWYRWETAKSPEALFVMTLNGDEKKKGRISATLNTKEGYSYLYIKGSQPEDSATYLCAPDTGRRALTFGSGTRLQVQPNIQNPDPAVYQLRDSKSSDKSVCLFTDFDSQTNVSQSKDSDVYITDKTVLDMRSMDFKSNSAVAWSNKSDFACANAFNNSIIPEDTFFPSPESSCDVKLVEKSFETDTNLNFQNLSVIGFRILLLKVAGFNLLMTLRLWS

SEQ ID NO: 842 - protein, 314 aa, Homo sapiens
MDTRVLCCAVICLLGAGLSNAGVMQNPRHLVRRRGQEARLRCSPMKGHSHVYWYRQLPEEGLKFMVYLQKENIIDESGMPKERFSAEFPKEGPSILRIQQVVRGDSAAYFCASSPPSLALQETQYFGPGTRLLVLEDLKNVFPPEVAVFEPSEAEISHTQKATLVCLATGFYPDHVELSWWVNGKEVHSGVSTDPQPLKEQPALNDSRYCLSSRLRVSATFWQNPRNHFRCQVQFYGLSENDEWTQDRAKPVTQIVSAEAWGRADCGFTSESYQQGVLSATILYEILLGKATLYAVLVSALVLMAMVKRKDSRG

SEQ ID NO: 843 - protein, 270 aa, Homo sapiens
MLLLLVPVLEVIFTLGGTRAQSVTQLDSHVSVSEGTPVLLRCNYSSSYSPSLFWYVQHPNKGLQLLLKYTSAATLVKGINGFEAEFKKSETSFHLTKPSAHMSDAAEYFCVVLRNNDMRFGAGTRLTVKPNIQNPDPAVYQLRDSKSSDKSVCLFTDFDSQTNVSQSKDSDVYITDKTVLDMRSMDFKSNSAVAWSNKSDFACANAFNNSIIPEDTFFPSPESSCDVKLVEKSFETDTNLNFQNLSVIGFRILLLKVAGFNLLMTLRLWS

SEQ ID NO: 844 - protein, 311 aa, Homo sapiens
MGPQLLGYVVLCLLGAGPLEAQVTQNPRYLITVTGKKLTVTCSQNMNHEYMSWYRQDPGLGLRQIYYSMNVEVTDKGDVPEGYKVSRKEKRNFPLILESPSPNQTSLYFCASSPRGGWDTQYFGPGTRLTVLEDLKNVFPPEVAVFEPSEAEISHTQKATLVCLATGFYPDHVELSWWVNGKEVHSGVSTDPQPLKEQPALNDSRYCLSSRLRVSATFWQNPRNHFRCQVQFYGLSENDEWTQDRAKPVTQIVSAEAWGRADCGFTSESYQQGVLSATILYEILLGKATLYAVLVSALVLMAMVKRKDSRG

SEQ ID NO: 845 - protein, 273 aa, Homo sapiens
MTSIRAVFIFLWLQLDLVNGENVEQHPSTLSVQEGDSAVIKCTYSDSASNYFPWYKQELGKGPQLIIDIRSNVGEKKDQRIAVTLNKTAKHFSLHITETQPEDSAVYFCAAARPTGTASKLTFGTGTRLQVTLDIQNPDPAVYQLRDSKSSDKSVCLFTDFDSQTNVSQSKDSDVYITDKTVLDMRSMDFKSNSAVAWSNKSDFACANAFNNSIIPEDTFFPSPESSCDVKLVEKSFETDTNLNFQNLSVIGFRILLLKVAGFNLLMTLRLWS

SEQ ID NO: 846 - protein, 311 aa, Homo sapiens
MGIRLLCRVAFCFLAVGLVDVKVTQSSRYLVKRTGEKVFLECVQDMDHENMFWYRQDPGLGLRLIYFSYDVKMKEKGDIPEGYSVSREKKERFSLILESASTNQTSMYLCASSWTSGSYEQYFGPGTRLTVTEDLKNVFPPEVAVFEPSEAEISHTQKATLVCLATGFYPDHVELSWWVNGKEVHSGVSTDPQPLKEQPALNDSRYCLSSRLRVSATFWQNPRNHFRCQVQFYGLSENDEWTQDRAKPVTQIVSAEAWGRADCGFTSESYQQGVLSATILYEILLGKATLYAVLVSALVLMAMVKRKDSRG

SEQ ID NO: 847 - protein, 269 aa, Homo sapiens
MLLEHLLIILWMQLTWVSGQQLNQSPQSMFIQEGEDVSMNCTSSSIFNTWLWYKQEPGEGPVLLIALYKAGELTSNGRLTAQFGITRKDSFLNISASIPSDVGIYFCAGLPNTGNQFYFGTGTSLTVIPNIQNPDPAVYQLRDSKSSDKSVCLFTDFDSQTNVSQSKDSDVYITDKTVLDMRSMDFKSNSAVAWSNKSDFACANAFNNSIIPEDTFFPSPESSCDVKLVEKSFETDTNLNFQNLSVIGFRILLLKVAGFNLLMTLRLWS

SEQ ID NO: 848 - protein, 311 aa, Homo sapiens
MGPQLLGYVVLCLLGAGPLEAQVTQNPRYLITVTGKKLTVTCSQNMNHEYMSWYRQDPGLGLRQIYYSMNVEVTDKGDVPEGYKVSRKEKRNFPLILESPSPNQTSLYFCASSHRAPQETQYFGPGTRLLVLEDLKNVFPPEVAVFEPSEAEISHTQKATLVCLATGFYPDHVELSWWVNGKEVHSGVSTDPQPLKEQPALNDSRYCLSSRLRVSATFWQNPRNHFRCQVQFYGLSENDEWTQDRAKPVTQIVSAEAWGRADCGFTSESYQQGVLSATILYEILLGKATLYAVLVSALVLMAMVKRKDSRG

SEQ ID NO: 849 - protein, 278 aa, Homo sapiens
MTRVSLLWAVVVSTCLESGMAQTVTQSQPEMSVQEAETVTLSCTYDTSENNYYLFWYKQPPSRQMILVIRQEAYKQQNATENRFSVNFQKAAKSFSLKISDSQLGDTAMYFCAFMNPFGEGGSEKLVFGKGTKLTVNPYIQNPDPAVYQLRDSKSSDKSVCLFTDFDSQTNVSQSKDSDVYITDKTVLDMRSMDFKSNSAVAWSNKSDFACANAFNNSIIPEDTFFPSPESSCDVKLVEKSFETDTNLNFQNLSVIGFRILLLKVAGFNLLMTLRLWS

SEQ ID NO: 850 - protein, 308 aa, Homo sapiens
MGPQLLGYVVLCLLGAGPLEAQVTQNPRYLITVTGKKLTVTCSQNMNHEYMSWYRQDPGLGLRQIYYSMNVEVTDKGDVPEGYKVSRKEKRNFPLILESPSPNQTSLYFCASSLSSNEKLFFGSGTQLSVLEDLNKVFPPEVAVFEPSEAEISHTQKATLVCLATGFFPDHVELSWWVNGKEVHSGVSTDPQPLKEQPALNDSRYCLSSRLRVSATFWQNPRNHFRCQVQFYGLSENDEWTQDRAKPVTQIVSAEAWGRADCGFTSVSYQQGVLSATILYEILLGKATLYAVLVSALVLMAMVKRKDF

SEQ ID NO: 851 - protein, 311 aa, Homo sapiens
MGPQLLGYVVLCLLGAGPLEAQVTQNPRYLITVTGKKLTVTCSQNMNHEYMSWYRQDPGLGLRQIYYSMNVEVTDKGDVPEGYKVSRKEKRNFPLILESPSPNQTSLYFCASSFRDGGDEQYFGPGTRLTVTEDLKNVFPPEVAVFEPSEAEISHTQKATLVCLATGFYPDHVELSWWVNGKEVHSGVSTDPQPLKEQPALNDSRYCLSSRLRVSATFWQNPRNHFRCQVQFYGLSENDEWTQDRAKPVTQIVSAEAWGRADCGFTSESYQQGVLSATILYEILLGKATLYAVLVSALVLMAMVKRKDSRG

SEQ ID NO: 852 - protein, 269 aa, Homo sapiens
MNYSPGLVSLILLLLGRTRGNSVTQMEGPVTLSEEAFLTINCTYTATGYPSLFWYVQYPGEGLQLLLKATKADDKGSNKGFEATYRKETTSFHLEKGSVQVSDSAVYFCALSGVNQFYFGTGTSLTVIPNIQNPDPAVYQLRDSKSSDKSVCLFTDFDSQTNVSQSKDSDVYITDKTVLDMRSMDFKSNSAVAWSNKSDFACANAFNNSIIPEDTFFPSPESSCDVKLVEKSFETDTNLNFQNLSVIGFRILLLKVAGFNLLMTLRLWS

SEQ ID NO: 853 - protein, 311 aa, Homo sapiens
MGPQLLGYVVLCLLGAGPLEAQVTQNPRYLITVTGKKLTVTCSQNMNHEYMSWYRQDPGLGLRQIYYSMNVEVTDKGDVPEGYKVSRKEKRNFPLILESPSPNQTSLYFCASSLRGPTDTQYFGPGTRLTVLEDLKNVFPPEVAVFEPSEAEISHTQKATLVCLATGFYPDHVELSWWVNGKEVHSGVSTDPQPLKEQPALNDSRYCLSSRLRVSATFWQNPRNHFRCQVQFYGLSENDEWTQDRAKPVTQIVSAEAWGRADCGFTSESYQQGVLSATILYEILLGKATLYAVLVSALVLMAMVKRKDSRG

SEQ ID NO: 854 - protein, 275 aa, Homo sapiens
MNYSPGLVSLILLLLGRTRGNSVTQMEGPVTLSEEAFLTINCTYTATGYPSLFWYVQYPGEGLQLLLKATKADDKGSNKGFEATYRKETTSFHLEKGSVQVSDSAVYFCALTGTTDSWGKLQFEFGAGTQVVVTPDIQNPDPAVYQLRDSKSSDKSVCLFTDFDSQTNVSQSKDSDVYITDKTVLDMRSMDFKSNSAVAWSNKSDFACANAFNNSIIPEDTFFPSPESSCDVKLVEKSFETDTNLNFQNLSVIGFRILLLKVAGFNLLMTLRLWS

SEQ ID NO: 855 - protein, 311 aa, Homo sapiens
MGPQLLGYVVLCLLGAGPLEAQVTQNPRYLITVTGKKLTVTCSQNMNHEYMSWYRQDPGLGLRQIYYSMNVEVTDKGDVPEGYKVSRKEKRNFPLILESPSPNQTSLYFCASSPRDPTYEQYFGPGTRLTVTEDLKNVFPPEVAVFEPSEAEISHTQKATLVCLATGFYPDHVELSWWVNGKEVHSGVSTDPQPLKEQPALNDSRYCLSSRLRVSATFWQNPRNHFRCQVQFYGLSENDEWTQDRAKPVTQIVSAEAWGRADCGFTSESYQQGVLSATILYEILLGKATLYAVLVSALVLMAMVKRKDSRG

SEQ ID NO: 856 - protein, 269 aa, Homo sapiens
MKKLLAMILWLQLDRLSGELKVEQNPLFLSMQEGKNYTIYCNYSTTSDRLYWYRQDPGKSLESLFVLLSNGAVKQEGRLMASLDTKARLSTLHITAAVHDLSATYFCAVDLPAGTALIFGKGTTLSVSSNIQNPDPAVYQLRDSKSSDKSVCLFTDFDSQTNVSQSKDSDVYITDKTVLDMRSMDFKSNSAVAWSNKSDFACANAFNNSIIPEDTFFPSPESSCDVKLVEKSFETDTNLNFQNLSVIGFRILLLKVAGFNLLMTLRLWS

SEQ ID NO: 857 - protein, 310 aa, Homo sapiens
MSIGLLCCAALSLLWAGPVNAGVTQTPKFQVLKTGQSMTLQCAQDMNHEYMSWYRQDPGMGLRLIHYSVGAGITDQGEVPNGYNVSRSTTEDFPLRLLSAAPSQTSVYFCASSYSNGYEQYFGPGTRLTVTEDLKNVFPPEVAVFEPSEAEISHTQKATLVCLATGFYPDHVELSWWVNGKEVHSGVSTDPQPLKEQPALNDSRYCLSSRLRVSATFWQNPRNHFRCQVQFYGLSENDEWTQDRAKPVTQIVSAEAWGRADCGFTSESYQQGVLSATILYEILLGKATLYAVLVSALVLMAMVKRKDSRG

SEQ ID NO: 858 - protein, 279 aa, Homo sapiens
MAMLLGASVLILWLQPDWVNSQQKNDDQQVKQNSPSLSVQEGRISILNCDYTNSMFDYFLWYKKYPAEGPTFLISISSIKDKNEDGRFTVFLNKSAKHLSLHIVPSQPGDSAVYFCAASMGFGNEKLTFGTGTRLTIIPNIQNPDPAVYQLRDSKSSDKSVCLFTDFDSQTNVSQSKDSDVYITDKTVLDMRSMDFKSNSAVAWSNKSDFACANAFNNSIIPEDTFFPSPESSCDVKLVEKSFETDTNLNFQNLSVIGFRILLLKVAGFNLLMTLRLWS

SEQ ID NO: 859 - protein, 307 aa, Homo sapiens
MGFRLLCCVAFCLLGAGPVDSGVTQTPKHLITATGQRVTLRCSPRSGDLSVYWYQQSLDQGLQFLIQYYNGEERAKGNILERFSAQQFPDLHSELNLSSLELGDSALYFCASSAGYYGYTFGSGTRLTVVEDLNKVFPPEVAVFEPSEAEISHTQKATLVCLATGFFPDHVELSWWVNGKEVHSGVSTDPQPLKEQPALNDSRYCLSSRLRVSATFWQNPRNHFRCQVQFYGLSENDEWTQDRAKPVTQIVSAEAWGRADCGFTSVSYQQGVLSATILYEILLGKATLYAVLVSALVLMAMVKRKDF

SEQ ID NO: 860 - protein, 279 aa, Homo sapiens
MSLSSLLKVVTASLWLGPGIAQKITQTQPGMFVQEKEAVTLDCTYDTSDPSYGLFWYKQPSSGEMIFLIYQGSYDQQNATEGRYSLNFQKARKSANLVISASQLGDSAMYFCAMREGPVKWGSNYKLTFGKGTLLTVNPNIQNPDPAVYQLRDSKSSDKSVCLFTDFDSQTNVSQSKDSDVYITDKTVLDMRSMDFKSNSAVAWSNKSDFACANAFNNSIIPEDTFFPSPESSCDVKLVEKSFETDTNLNFQNLSVIGFRILLLKVAGFNLLMTLRLWS

SEQ ID NO: 861 - protein, 313 aa, Homo sapiens
MGTSLLCWVVLGFLGTDHTGAGVSQSPRYKVTKRGQDVALRCDPISGHVSLYWYRQALGQGPEFLTYFNYEAQQDKSGLPNDRFSAERPEGSISTLTIQRTEQRDSAMYRCASSLRLWPGPNYGYTFGSGTRLTVVEDLNKVFPPEVAVFEPSEAEISHTQKATLVCLATGFFPDHVELSWWVNGKEVHSGVSTDPQPLKEQPALNDSRYCLSSRLRVSATFWQNPRNHFRCQVQFYGLSENDEWTQDRAKPVTQIVSAEAWGRADCGFTSVSYQQGVLSATILYEILLGKATLYAVLVSALVLMAMVKRKDF

SEQ ID NO: 862 - protein, 279 aa, Homo sapiens
MAMLLGASVLILWLQPDWVNSQQKNDDQQVKQNSPSLSVQEGRISILNCDYTNSMFDYFLWYKKYPAEGPTFLISISSIKDKNEDGRFTVFLNKSAKHLSLHIVPSQPGDSAVYFCAASVGLGNEKLTFGTGTRLTIIPNIQNPDPAVYQLRDSKSSDKSVCLFTDFDSQTNVSQSKDSDVYITDKTVLDMRSMDFKSNSAVAWSNKSDFACANAFNNSIIPEDTFFPSPESSCDVKLVEKSFETDTNLNFQNLSVIGFRILLLKVAGFNLLMTLRLWS

SEQ ID NO: 863 - protein, 308 aa, Homo sapiens
MGFRLLCCVAFCLLGAGPVDSGVTQTPKHLITATGQRVTLRCSPRSGDLSVYWYQQSLDQGLQFLIQYYNGEERAKGNILERFSAQQFPDLHSELNLSSLELGDSALYFCASSAGGGTEAFFGQGTRLTVVEDLNKVFPPEVAVFEPSEAEISHTQKATLVCLATGFFPDHVELSWWVNGKEVHSGVSTDPQPLKEQPALNDSRYCLSSRLRVSATFWQNPRNHFRCQVQFYGLSENDEWTQDRAKPVTQIVSAEAWGRADCGFTSVSYQQGVLSATILYEILLGKATLYAVLVSALVLMAMVKRKDF

SEQ ID NO: 864 - protein, 269 aa, Homo sapiens
MASAPISMLAMLFTLSGLRAQSVAQPEDQVNVAEGNPLTVKCTYSVSGNPYLFWYVQYPNRGLQFLLKYITGDNLVKGSYGFEAEFNKSQTSFHLKKPSALVSDSALYFCAVKNYQLIWGAGTKLIIKPDIQNPDPAVYQLRDSKSSDKSVCLFTDFDSQTNVSQSKDSDVYITDKTVLDMRSMDFKSNSAVAWSNKSDFACANAFNNSIIPEDTFFPSPESSCDVKLVEKSFETDTNLNFQNLSVIGFRILLLKVAGFNLLMTLRLWS

SEQ ID NO: 865 - protein, 313 aa, Homo sapiens
MSIGLLCCAALSLLWAGPVNAGVTQTPKFQVLKTGQSMTLQCAQDMNHEYMSWYRQDPGMGLRLIHYSVGAGITDQGEVPNGYNVSRSTTEDFPLRLLSAAPSQTSVYFCASSWGGGQSTGELFFGEGSRLTVLEDLKNVFPPEVAVFEPSEAEISHTQKATLVCLATGFYPDHVELSWWVNGKEVHSGVSTDPQPLKEQPALNDSRYCLSSRLRVSATFWQNPRNHFRCQVQFYGLSENDEWTQDRAKPVTQIVSAEAWGRADCGFTSESYQQGVLSATILYEILLGKATLYAVLVSALVLMAMVKRKDSRG

SEQ ID NO: 866 - protein, 274 aa, Homo sapiens
MMKSLRVLLVILWLQLSWVWSQQKEVEQDPGPLSVPEGAIVSLNCTYSNSAFQYFMWYRQYSRKGPELLMYTYSSGNKEDGRFTAQVDKSSKYISLFIRDSQPSDSATYLCAMSLRSGYSTLTFGKGTMLLVSPDIQNPDPAVYQLRDSKSSDKSVCLFTDFDSQTNVSQSKDSDVYITDKTVLDMRSMDFKSNSAVAWSNKSDFACANAFNNSIIPEDTFFPSPESSCDVKLVEKSFETDTNLNFQNLSVIGFRILLLKVAGFNLLMTLRLWS

SEQ ID NO: 867 - protein, 309 aa, Homo sapiens
MGPQLLGYVVLCLLGAGPLEAQVTQNPRYLITVTGKKLTVTCSQNMNHEYMSWYRQDPGLGLRQIYYSMNVEVTDKGDVPEGYKVSRKEKRNFPLILESPSPNQTSLYFCASSPGGLGEKLFFGSGTQLSVLEDLNKVFPPEVAVFEPSEAEISHTQKATLVCLATGFFPDHVELSWWVNGKEVHSGVSTDPQPLKEQPALNDSRYCLSSRLRVSATFWQNPRNHFRCQVQFYGLSENDEWTQDRAKPVTQIVSAEAWGRADCGFTSVSYQQGVLSATILYEILLGKATLYAVLVSALVLMAMVKRKDF

SEQ ID NO: 868 - protein, 275 aa, Homo sapiens
MLTASLLRAVIASICVVSSMAQKVTQAQTEISVVEKEDVTLDCVYETRDTTYYLFWYKQPPSGELVFLIRRNSFDEQNEISGRYSWNFQKSTSSFNFTITASQVVDSAVYFCALTPSGGYQKVTFGIGTKLQVIPNIQNPDPAVYQLRDSKSSDKSVCLFTDFDSQTNVSQSKDSDVYITDKTVLDMRSMDFKSNSAVAWSNKSDFACANAFNNSIIPEDTFFPSPESSCDVKLVEKSFETDTNLNFQNLSVIGFRILLLKVAGFNLLMTLRLWS

SEQ ID NO: 869 - protein, 9 aa, Severe acute respiratory syndrome coronavirus 2
PTDNYITTY

SEQ ID NO: 870 - protein, 272 aa, Homo sapiens
MISLRVLLVILWLQLSWVWSQRKEVEQDPGPFNVPEGATVAFNCTYSNSASQSFFWYRQDCRKEPKLLMSVYSSGNEDGRFTAQLNRASQYISLLIRDSKLSDSATYLCVVNWPGGYNKLIFGAGTRLAVHPYIQNPDPAVYQLRDSKSSDKSVCLFTDFDSQTNVSQSKDSDVYITDKTVLDMRSMDFKSNSAVAWSNKSDFACANAFNNSIIPEDTFFPSPESSCDVKLVEKSFETDTNLNFQNLSVIGFRILLLKVAGFNLLMTLRLWS

SEQ ID NO: 871 - protein, 312 aa, Homo sapiens
MGPQLLGYVVLCLLGAGPLEAQVTQNPRYLITVTGKKLTVTCSQNMNHEYMSWYRQDPGLGLRQIYYSMNVEVTDKGDVPEGYKVSRKEKRNFPLILESPSPNQTSLYFCASSNPTDATDTQYFGPGTRLTVLEDLKNVFPPEVAVFEPSEAEISHTQKATLVCLATGFYPDHVELSWWVNGKEVHSGVSTDPQPLKEQPALNDSRYCLSSRLRVSATFWQNPRNHFRCQVQFYGLSENDEWTQDRAKPVTQIVSAEAWGRADCGFTSESYQQGVLSATILYEILLGKATLYAVLVSALVLMAMVKRKDSRG

SEQ ID NO: 872 - protein, 311 aa, Homo sapiens
MGCRLLCCAVLCLLGAVPIDTEVTQTPKHLVMGMTNKKSLKCEQHMGHRAMYWYKQKAKKPPELMFVYSYEKLSINESVPSRFSPECPNSSLLNLHLHALQPEDSALYLCASSQDRDRETQYFGPGTRLLVLEDLKNVFPPEVAVFEPSEAEISHTQKATLVCLATGFYPDHVELSWWVNGKEVHSGVSTDPQPLKEQPALNDSRYCLSSRLRVSATFWQNPRNHFRCQVQFYGLSENDEWTQDRAKPVTQIVSAEAWGRADCGFTSESYQQGVLSATILYEILLGKATLYAVLVSALVLMAMVKRKDSRG

SEQ ID NO: 873 - protein, 273 aa, Homo sapiens
MISLRVLLVILWLQLSWVWSQRKEVEQDPGPFNVPEGATVAFNCTYSNSASQSFFWYRQDCRKEPKLLMSVYSSGNEDGRFTAQLNRASQYISLLIRDSKLSDSATYLCVARADSWGKLQFEFGAGTQVVVTPDIQNPDPAVYQLRDSKSSDKSVCLFTDFDSQTNVSQSKDSDVYITDKTVLDMRSMDFKSNSAVAWSNKSDFACANAFNNSIIPEDTFFPSPESSCDVKLVEKSFETDTNLNFQNLSVIGFRILLLKVAGFNLLMTLRLWS

SEQ ID NO: 874 - protein, 311 aa, Homo sapiens
MGIRLLCRVAFCFLAVGLVDVKVTQSSRYLVKRTGEKVFLECVQDMDHENMFWYRQDPGLGLRLIYFSYDVKMKEKGDIPEGYSVSREKKERFSLILESASTNQTSMYLCASSFASNSYEQYFGPGTRLTVTEDLKNVFPPEVAVFEPSEAEISHTQKATLVCLATGFYPDHVELSWWVNGKEVHSGVSTDPQPLKEQPALNDSRYCLSSRLRVSATFWQNPRNHFRCQVQFYGLSENDEWTQDRAKPVTQIVSAEAWGRADCGFTSESYQQGVLSATILYEILLGKATLYAVLVSALVLMAMVKRKDSRG

SEQ ID NO: 875 - protein, 274 aa, Homo sapiens
MAGIRALFMYLWLQLDWVSRGESVGLHLPTLSVQEGDNSIINCAYSNSASDYFIWYKQESGKGPQFIIDIRSNMDKRQGQRVTVLLNKTVKHLSLQIAATQPGDSAVYFCAEAYYGGSQGNLIFGKGTKLSVKPNIQNPDPAVYQLRDSKSSDKSVCLFTDFDSQTNVSQSKDSDVYITDKTVLDMRSMDFKSNSAVAWSNKSDFACANAFNNSIIPEDTFFPSPESSCDVKLVEKSFETDTNLNFQNLSVIGFRILLLKVAGFNLLMTLRLWS

SEQ ID NO: 876 - protein, 314 aa, Homo sapiens
MSNQVLCCVVLCFLGANTVDGGITQSPKYLFRKEGQNVTLSCEQNLNHDAMYWYRQDPGQGLRLIYYSQIVNDFQKGDIAEGYSVSREKKESFPLTVTSAQKNPTAFYLCASSILLAALDTDTQYFGPGTRLTVLEDLKNVFPPEVAVFEPSEAEISHTQKATLVCLATGFYPDHVELSWWVNGKEVHSGVSTDPQPLKEQPALNDSRYCLSSRLRVSATFWQNPRNHFRCQVQFYGLSENDEWTQDRAKPVTQIVSAEAWGRADCGFTSESYQQGVLSATILYEILLGKATLYAVLVSALVLMAMVKRKDSRG

SEQ ID NO: 877 - protein, 273 aa, Homo sapiens
MISLRVLLVILWLQLSWVWSQRKEVEQDPGPFNVPEGATVAFNCTYSNSASQSFFWYRQDCRKEPKLLMSVYSSGNEDGRFTAQLNRASQYISLLIRDSKLSDSATYLCVVRSDSWGKLQFEFGAGTQVVVTPDIQNPDPAVYQLRDSKSSDKSVCLFTDFDSQTNVSQSKDSDVYITDKTVLDMRSMDFKSNSAVAWSNKSDFACANAFNNSIIPEDTFFPSPESSCDVKLVEKSFETDTNLNFQNLSVIGFRILLLKVAGFNLLMTLRLWS

SEQ ID NO: 878 - protein, 311 aa, Homo sapiens
MGIRLLCRVAFCFLAVGLVDVKVTQSSRYLVKRTGEKVFLECVQDMDHENMFWYRQDPGLGLRLIYFSYDVKMKEKGDIPEGYSVSREKKERFSLILESASTNQTSMYLCASSRSSNSYEQYFGPGTRLTVTEDLKNVFPPEVAVFEPSEAEISHTQKATLVCLATGFYPDHVELSWWVNGKEVHSGVSTDPQPLKEQPALNDSRYCLSSRLRVSATFWQNPRNHFRCQVQFYGLSENDEWTQDRAKPVTQIVSAEAWGRADCGFTSESYQQGVLSATILYEILLGKATLYAVLVSALVLMAMVKRKDSRG

SEQ ID NO: 879 - protein, 273 aa, Homo sapiens
MISLRVLLVILWLQLSWVWSQRKEVEQDPGPFNVPEGATVAFNCTYSNSASQSFFWYRQDCRKEPKLLMSVYSSGNEDGRFTAQLNRASQYISLLIRDSKLSDSATYLCVVRADSWGKFQFEFGAGTQVVVTPDIQNPDPAVYQLRDSKSSDKSVCLFTDFDSQTNVSQSKDSDVYITDKTVLDMRSMDFKSNSAVAWSNKSDFACANAFNNSIIPEDTFFPSPESSCDVKLVEKSFETDTNLNFQNLSVIGFRILLLKVAGFNLLMTLRLWS

SEQ ID NO: 880 - protein, 311 aa, Homo sapiens
MGIRLLCRVAFCFLAVGLVDVKVTQSSRYLVKRTGEKVFLECVQDMDHENMFWYRQDPGLGLRLIYFSYDVKMKEKGDIPEGYSVSREKKERFSLILESASTNQTSMYLCASSLRSNSYEQYFGPGTRLTVTEDLKNVFPPEVAVFEPSEAEISHTQKATLVCLATGFYPDHVELSWWVNGKEVHSGVSTDPQPLKEQPALNDSRYCLSSRLRVSATFWQNPRNHFRCQVQFYGLSENDEWTQDRAKPVTQIVSAEAWGRADCGFTSESYQQGVLSATILYEILLGKATLYAVLVSALVLMAMVKRKDSRG

SEQ ID NO: 881 - protein, 273 aa, Homo sapiens
MISLRVLLVILWLQLSWVWSQRKEVEQDPGPFNVPEGATVAFNCTYSNSASQSFFWYRQDCRKEPKLLMSVYSSGNEDGRFTAQLNRASQYISLLIRDSKLSDSATYLCVVRTDSWGKLQFEFGAGTQVVVTPDIQNPDPAVYQLRDSKSSDKSVCLFTDFDSQTNVSQSKDSDVYITDKTVLDMRSMDFKSNSAVAWSNKSDFACANAFNNSIIPEDTFFPSPESSCDVKLVEKSFETDTNLNFQNLSVIGFRILLLKVAGFNLLMTLRLWS

SEQ ID NO: 882 - protein, 311 aa, Homo sapiens
MGIRLLCRVAFCFLAVGLVDVKVTQSSRYLVKRTGEKVFLECVQDMDHENMFWYRQDPGLGLRLIYFSYDVKMKEKGDIPEGYSVSREKKERFSLILESASTNQTSMYLCASSLRTNSYEQYFGPGTRLTVTEDLKNVFPPEVAVFEPSEAEISHTQKATLVCLATGFYPDHVELSWWVNGKEVHSGVSTDPQPLKEQPALNDSRYCLSSRLRVSATFWQNPRNHFRCQVQFYGLSENDEWTQDRAKPVTQIVSAEAWGRADCGFTSESYQQGVLSATILYEILLGKATLYAVLVSALVLMAMVKRKDSRG

SEQ ID NO: 883 - protein, 273 aa, Homo sapiens
MISLRVLLVILWLQLSWVWSQRKEVEQDPGPFNVPEGATVAFNCTYSNSASQSFFWYRQDCRKEPKLLMSVYSSGNEDGRFTAQLNRASQYISLLIRDSKLSDSATYLCVVRADSWGKLQFEFGAGTQVVVTPDIQNPDPAVYQLRDSKSSDKSVCLFTDFDSQTNVSQSKDSDVYITDKTVLDMRSMDFKSNSAVAWSNKSDFACANAFNNSIIPEDTFFPSPESSCDVKLVEKSFETDTNLNFQNLSVIGFRILLLKVAGFNLLMTLRLWS

SEQ ID NO: 884 - protein, 311 aa, Homo sapiens
MGIRLLCRVAFCFLAVGLVDVKVTQSSRYLVKRTGEKVFLECVQDMDHENMFWYRQDPGLGLRLIYFSYDVKMKEKGDIPEGYSVSREKKERFSLILESASTNQTSMYLCASSFHSSSYEQYFGPGTRLTVTEDLKNVFPPEVAVFEPSEAEISHTQKATLVCLATGFYPDHVELSWWVNGKEVHSGVSTDPQPLKEQPALNDSRYCLSSRLRVSATFWQNPRNHFRCQVQFYGLSENDEWTQDRAKPVTQIVSAEAWGRADCGFTSESYQQGVLSATILYEILLGKATLYAVLVSALVLMAMVKRKDSRG

SEQ ID NO: 885 - protein, 272 aa, Homo sapiens
MKSLRVLLVILWLQLSWVWSQQKEVEQNSGPLSVPEGAIASLNCTYSDRGSQSFFWYRQYSGKSPELIMFIYSNGDKEDGRFTAQLNKASQYVSLLIRDSQPSDSATYLCAVNGRGYQKVTFGIGTKLQVIPNIQNPDPAVYQLRDSKSSDKSVCLFTDFDSQTNVSQSKDSDVYITDKTVLDMRSMDFKSNSAVAWSNKSDFACANAFNNSIIPEDTFFPSPESSCDVKLVEKSFETDTNLNFQNLSVIGFRILLLKVAGFNLLMTLRLWS

SEQ ID NO: 886 - protein, 315 aa, Homo sapiens
MGCRLLCCAVLCLLGAGELVPMETGVTQTPRHLVMGMTNKKSLKCEQHLGHNAMYWYKQSAKKPLELMFVYSLEERVENNSVPSRFSPECPNSSHLFLHLHTLQPEDSALYLCASSQDPAGNSNQPQHFGDGTRLSILEDLNKVFPPEVAVFEPSEAEISHTQKATLVCLATGFFPDHVELSWWVNGKEVHSGVSTDPQPLKEQPALNDSRYCLSSRLRVSATFWQNPRNHFRCQVQFYGLSENDEWTQDRAKPVTQIVSAEAWGRADCGFTSVSYQQGVLSATILYEILLGKATLYAVLVSALVLMAMVKRKDF

SEQ ID NO: 887 - protein, 272 aa, Homo sapiens
METLLGLLILWLQLQWVSSKQEVTQIPAALSVPEGENLVLNCSFTDSAIYNLQWFRQDPGKGLTSLLLIQSSQREQTSGRLNASLDKSSGRSTLYIAASQPGDSATYLCAVRPQGNDYKLSFGAGTTVTVRANIQNPDPAVYQLRDSKSSDKSVCLFTDFDSQTNVSQSKDSDVYITDKTVLDMRSMDFKSNSAVAWSNKSDFACANAFNNSIIPEDTFFPSPESSCDVKLVEKSFETDTNLNFQNLSVIGFRILLLKVAGFNLLMTLRLWS

SEQ ID NO: 888 - protein, 311 aa, Homo sapiens
MGFRLLCCVAFCLLGAGPVDSGVTQTPKHLITATGQRVTLRCSPRSGDLSVYWYQQSLDQGLQFLIQYYNGEERAKGNILERFSAQQFPDLHSELNLSSLELGDSALYFCASGPGTDSYEQYFGPGTRLTVTEDLKNVFPPEVAVFEPSEAEISHTQKATLVCLATGFYPDHVELSWWVNGKEVHSGVSTDPQPLKEQPALNDSRYCLSSRLRVSATFWQNPRNHFRCQVQFYGLSENDEWTQDRAKPVTQIVSAEAWGRADCGFTSESYQQGVLSATILYEILLGKATLYAVLVSALVLMAMVKRKDSRG

SEQ ID NO: 889 - protein, 274 aa, Homo sapiens
MISLRVLLVILWLQLSWVWSQRKEVEQDPGPFNVPEGATVAFNCTYSNSASQSFFWYRQDCRKEPKLLMSVYSSGNEDGRFTAQLNRASQYISLLIRDSKLSDSATYLCVVNRYSGGGADGLTFGKGTHLIIQPYIQNPDPAVYQLRDSKSSDKSVCLFTDFDSQTNVSQSKDSDVYITDKTVLDMRSMDFKSNSAVAWSNKSDFACANAFNNSIIPEDTFFPSPESSCDVKLVEKSFETDTNLNFQNLSVIGFRILLLKVAGFNLLMTLRLWS

SEQ ID NO: 890 - protein, 315 aa, Homo sapiens
MSIGLLCCAALSLLWAGPVNAGVTQTPKFQVLKTGQSMTLQCAQDMNHEYMSWYRQDPGMGLRLIHYSVGAGITDQGEVPNGYNVSRSTTEDFPLRLLSAAPSQTSVYFCASSYSNGGAARDGELFFGEGSRLTVLEDLKNVFPPEVAVFEPSEAEISHTQKATLVCLATGFYPDHVELSWWVNGKEVHSGVSTDPQPLKEQPALNDSRYCLSSRLRVSATFWQNPRNHFRCQVQFYGLSENDEWTQDRAKPVTQIVSAEAWGRADCGFTSESYQQGVLSATILYEILLGKATLYAVLVSALVLMAMVKRKDSRG

SEQ ID NO: 891 - protein, 273 aa, Homo sapiens
MISLRVLLVILWLQLSWVWSQRKEVEQDPGPFNVPEGATVAFNCTYSNSASQSFFWYRQDCRKEPKLLMSVYSSGNEDGRFTAQLNRASQYISLLIRDSKLSDSATYLCVVRFDSWGKFQFEFGAGTQVVVTPDIQNPDPAVYQLRDSKSSDKSVCLFTDFDSQTNVSQSKDSDVYITDKTVLDMRSMDFKSNSAVAWSNKSDFACANAFNNSIIPEDTFFPSPESSCDVKLVEKSFETDTNLNFQNLSVIGFRILLLKVAGFNLLMTLRLWS

SEQ ID NO: 892 - protein, 308 aa, Homo sapiens
MLSLLLLLLGLGSVFSAVISQKPSRDICQRGTSLTIQCQVDSQVTMMFWYRQQPGQSLTLIATANQGSEATYESGFVIDKFPISRPNLTFSTLTVSNMSPEDSSIYLCSVEKGGGYEQYFGPGTRLTVTEDLKNVFPPEVAVFEPSEAEISHTQKATLVCLATGFYPDHVELSWWVNGKEVHSGVSTDPQPLKEQPALNDSRYCLSSRLRVSATFWQNPRNHFRCQVQFYGLSENDEWTQDRAKPVTQIVSAEAWGRADCGFTSESYQQGVLSATILYEILLGKATLYAVLVSALVLMAMVKRKDSRG

SEQ ID NO: 893 - protein, 269 aa, Homo sapiens
MKRILGALLGLLSAQVCCVRGIQVEQSPPDLILQEGANSTLRCNFSDSVNNLQWFHQNPWGQLINLFYIPSGTKQNGRLSATTVATERYSLLYISSSQTTDSGVYFCAGPYNFNKFYFGSGTKLNVKPNIIQNPDPAVYQLRDSKSSDKSVCLFTDFDSQTNVSQSKDSDVYITDKTVLDMRSMDFKSNSAVAWSNKSDFACANAFNNSIIPEDTFFPSPESSCDVKLVEKSFETDTNLNFQNLSVIGFRILLLKVAGFNLLMTLRLWS

SEQ ID NO: 894 - protein, 308 aa, Homo sapiens
MGCRLLCCVVFCLLQAGPLDTAVSQTPKYLVTQMGNDKSIKCEQNLGHDTMYWYKQDSKKFLKIMFSYNNKELIINETVPNRFSPKSPDKAHLNLHINSLELGDSAVYFCASSQDSRVGLFFGSGTQLSVLEDLNKVFPPEVAVFEPSEAEISHTQKATLVCLATGFFPDHVELSWWVNGKEVHSGVSTDPQPLKEQPALNDSRYCLSSRLRVSATFWQNPRNHFRCQVQFYGLSENDEWTQDRAKPVTQIVSAEAWGRADCGFTSVSYQQGVLSATILYEILLGKATLYAVLVSALVLMAMVKRKDF

SEQ ID NO: 895 - protein, 275 aa, Homo sapiens
MKKHLTTFLVILWLYFYRGNGKNQVEQSPQSLIILEGKNCTLQCNYTVSPFSNLRWYKQDTGRGPVSLTIMTFSENTKSNGRYTATLDADTKQSSLHITASQLSDSASYICVVSESYNTDKLIFGTGTRLQVFPNIIQNPDPAVYQLRDSKSSDKSVCLFTDFDSQTNVSQSKDSDVYITDKTVLDMRSMDFKSNSAVAWSNKSDFACANAFNNSIIPEDTFFPSPESSCDVKLVEKSFETDTNLNFQNLSVIGFRILLLKVAGFNLLMTLRLWS

SEQ ID NO: 896 - protein, 311 aa, Homo sapiens
MGSWTLCCVSLCILVAKHTDAGVIQSPRHEVTEMGQEVTLRCKPISGHDYLFWYRQTMMRGLELLIYFNNNVPIDDSGMPEDRFSAKMPNASFSTLKIQPSEPRDSAVYFCASNLVNTGELFFGEGSRLTVLEDLKNVFPPEVAVFEPSEAEISHTQKATLVCLATGFYPDHVELSWWVNGKEVHSGVSTDPQPLKEQPALNDSRYCLSSRLRVSATFWQNPRNHFRCQVQFYGLSENDEWTQDRAKPVTQIVSAEAWGRADCGFTSESYQQGVLSATILYEILLGKATLYAVLVSALVLMAMVKRKDSRG

SEQ ID NO: 897 - protein, 266 aa, Homo sapiens
MKLVTSITVLLSLGIMGDAKTTQPNSMESNEEEPVHLPCNHSTISGTDYIHWYRQLPSQGPEYVIHGLTSNVNNRMASLAIAEDRKSSTLILHRATLRDAAVYYCILITGGNKLVFGAGTILRVKSYIQNPDPAVYQLRDSKSSDKSVCLFTDFDSQTNVSQSKDSDVYITDKTVLDMRSMDFKSNSAVAWSNKSDFACANAFNNSIIPEDTFFPSPESSCDVKLVEKSFETDTNLNFQNLSVIGFRILLLKVAGFNLLMTLRLWS

SEQ ID NO: 898 - protein, 307 aa, Homo sapiens
MSNQVLCCVVLCFLGANTVDGGITQSPKYLFRKEGQNVTLSCEQNLNHDAMYWYRQDPGQGLRLIYYSQIVNDFQKGDIAEGYSVSREKKESFPLTVTSAQKNPTAFYLCASQAGITEAFFGQGTRLTVVEDLNKVFPPEVAVFEPSEAEISHTQKATLVCLATGFFPDHVELSWWVNGKEVHSGVSTDPQPLKEQPALNDSRYCLSSRLRVSATFWQNPRNHFRCQVQFYGLSENDEWTQDRAKPVTQIVSAEAWGRADCGFTSVSYQQGVLSATILYEILLGKATLYAVLVSALVLMAMVKRKDF

SEQ ID NO: 899 - protein, 271 aa, Homo sapiens
MEKMLECAFIVLWLQLGWLSGEDQVTQSPEALRLQEGESSSLNCSYTVSGLRGLFWYRQDPGKGPEFLFTLYSAGEEKEKERLKATLTKKESFLHITAPKPEDSATYLCAVQSTGNTPLVFGKGTRLSVIANIQNPDPAVYQLRDSKSSDKSVCLFTDFDSQTNVSQSKDSDVYITDKTVLDMRSMDFKSNSAVAWSNKSDFACANAFNNSIIPEDTFFPSPESSCDVKLVEKSFETDTNLNFQNLSVIGFRILLLKVAGFNLLMTLRLWS

SEQ ID NO: 900 - protein, 270 aa, Homo sapiens
MLLLLVPAFQVIFTLGGTRAQSVTQLDSQVPVFEEAPVELRCNYSSSVSVYLFWYVQYPNQGLQLLLKYLSGSTLVESINGFEAEFNKSQTSFHLRKPSVHISDTAEYFCAVSSGNQFYFGTGTSLTVIPNIQNPDPAVYQLRDSKSSDKSVCLFTDFDSQTNVSQSKDSDVYITDKTVLDMRSMDFKSNSAVAWSNKSDFACANAFNNSIIPEDTFFPSPESSCDVKLVEKSFETDTNLNFQNLSVIGFRILLLKVAGFNLLMTLRLWS

SEQ ID NO: 901 - protein, 309 aa, Homo sapiens
MLSLLLLLLGLGSVFSAVISQKPSRDICQRGTSLTIQCQVDSQVTMMFWYRQQPGQSLTLIATANQGSEATYESGFVIDKFPISRPNLTFSTLTVSNMSPEDSSIYLCSVEQGSSTDTQYFGPGTRLTVLEDLKNVFPPEVAVFEPSEAEISHTQKATLVCLATGFYPDHVELSWWVNGKEVHSGVSTDPQPLKEQPALNDSRYCLSSRLRVSATFWQNPRNHFRCQVQFYGLSENDEWTQDRAKPVTQIVSAEAWGRADCGFTSESYQQGVLSATILYEILLGKATLYAVLVSALVLMAMVKRKDSRG

SEQ ID NO: 902 - protein, 280 aa, Homo sapiens
MAMLLGASVLILWLQPDWVNSQQKNDDQQVKQNSPSLSVQEGRISILNCDYTNSMFDYFLWYKKYPAEGPTFLISISSIKDKNEDGRFTVFLNKSAKHLSLHIVPSQPGDSAVYFCAAFYSGGGADGLTFGKGTHLIIQPYIQNPDPAVYQLRDSKSSDKSVCLFTDFDSQTNVSQSKDSDVYITDKTVLDMRSMDFKSNSAVAWSNKSDFACANAFNNSIIPEDTFFPSPESSCDVKLVEKSFETDTNLNFQNLSVIGFRILLLKVAGFNLLMTLRLWS

SEQ ID NO: 903 - protein, 322 aa, Homo sapiens
MLSPDLPDSAWNTRLLCHVMLCLLGAVSVAAGVIQSPRHLIKEKRETATLKCYPIPRHDTVYWYQQGPGQDPQFLISFYEKMQSDKGSIPDRFSAQQFSDYHSELNMSSLELGDSALYFCASSPGLAPLNTQYFGPGTRLTVLEDLKNVFPPEVAVFEPSEAEISHTQKATLVCLATGFYPDHVELSWWVNGKEVHSGVSTDPQPLKEQPALNDSRYCLSSRLRVSATFWQNPRNHFRCQVQFYGLSENDEWTQDRAKPVTQIVSAEAWGRADCGFTSESYQQGVLSATILYEILLGKATLYAVLVSALVLMAMVKRKDSRG

SEQ ID NO: 904 - protein, 276 aa, Homo sapiens
MLTASLLRAVIASICVVSSMAQKVTQAQTEISVVEKEDVTLDCVYETRDTTYYLFWYKQPPSGELVFLIRRNSFDEQNEISGRYSWNFQKSTSSFNFTITASQVVDSAVYFCALDRTSGTYKYIFGTGTRLKVLANIIQNPDPAVYQLRDSKSSDKSVCLFTDFDSQTNVSQSKDSDVYITDKTVLDMRSMDFKSNSAVAWSNKSDFACANAFNNSIIPEDTFFPSPESSCDVKLVEKSFETDTNLNFQNLSVIGFRILLLKVAGFNLLMTLRLWS

SEQ ID NO: 905 - protein, 273 aa, Homo sapiens
MLLELIPLLGIHFVLRTARAQSVTQPDIHITVSEGASLELRCNYSYGATPYLFWYVQSPGQGLQLLLKYFSGDTLVQGIKGFEAEFKRSQSSFNLRKPSVHWSDAAEYFCAVGAQEGNNRLAFGKGNQVVVIPNIQNPDPAVYQLRDSKSSDKSVCLFTDFDSQTNVSQSKDSDVYITDKTVLDMRSMDFKSNSAVAWSNKSDFACANAFNNSIIPEDTFFPSPESSCDVKLVEKSFETDTNLNFQNLSVIGFRILLLKVAGFNLLMTLRLWS

SEQ ID NO: 906 - protein, 318 aa, Homo sapiens
MLLLLLLLGPGISLLLPGSLAGSGLGAVVSQHPSWVICKSGTSVKIECRSLDFQATTMFWYRQFPKQSLMLMATSNEGSKATYEQGVEKDKFLINHASLTLSTLTVTSAHPEDSSFYICSALSLVDNYGYTFGSGTRLTVVEDLNKVFPPEVAVFEPSEAEISHTQKATLVCLATGFFPDHVELSWWVNGKEVHSGVSTDPQPLKEQPALNDSRYCLSSRLRVSATFWQNPRNHFRCQVQFYGLSENDEWTQDRAKPVTQIVSAEAWGRADCGFTSVSYQQGVLSATILYEILLGKATLYAVLVSALVLMAMVKRKDF

SEQ ID NO: 907 - protein, 275 aa, Homo sapiens
MLLLLVPVLEVIFTLGGTRAQSVTQLDSHVSVSEGTPVLLRCNYSSSYSPSLFWYVQHPNKGLQLLLKYTSAATLVKGINGFEAEFKKSETSFHLTKPSAHMSDAAEYFCVVSGASSGGYQKVTFGIGTKLQVIPNIQNPDPAVYQLRDSKSSDKSVCLFTDFDSQTNVSQSKDSDVYITDKTVLDMRSMDFKSNSAVAWSNKSDFACANAFNNSIIPEDTFFPSPESSCDVKLVEKSFETDTNLNFQNLSVIGFRILLLKVAGFNLLMTLRLWS

SEQ ID NO: 908 - protein, 313 aa, Homo sapiens
MSNQVLCCVVLCFLGANTVDGGITQSPKYLFRKEGQNVTLSCEQNLNHDAMYWYRQDPGQGLRLIYYSQIVNDFQKGDIAEGYSVSREKKESFPLTVTSAQKNPTAFYLCASSIDSPSSYNEQFFGPGTRLTVLEDLKNVFPPEVAVFEPSEAEISHTQKATLVCLATGFYPDHVELSWWVNGKEVHSGVSTDPQPLKEQPALNDSRYCLSSRLRVSATFWQNPRNHFRCQVQFYGLSENDEWTQDRAKPVTQIVSAEAWGRADCGFTSESYQQGVLSATILYEILLGKATLYAVLVSALVLMAMVKRKDSRG

SEQ ID NO: 909 - protein, 272 aa, Homo sapiens
MAGIRALFMYLWLQLDWVSRGESVGLHLPTLSVQEGDNSIINCAYSNSASDYFIWYKQESGKGPQFIIDIRSNMDKRQGQRVTVLLNKTVKHLSLQIAATQPGDSAVYFCAEITSGYSTLTFGKGTMLLVSPDIQNPDPAVYQLRDSKSSDKSVCLFTDFDSQTNVSQSKDSDVYITDKTVLDMRSMDFKSNSAVAWSNKSDFACANAFNNSIIPEDTFFPSPESSCDVKLVEKSFETDTNLNFQNLSVIGFRILLLKVAGFNLLMTLRLWS

SEQ ID NO: 910 - protein, 312 aa, Homo sapiens
MSNQVLCCVVLCFLGANTVDGGITQSPKYLFRKEGQNVTLSCEQNLNHDAMYWYRQDPGQGLRLIYYSQIVNDFQKGDIAEGYSVSREKKESFPLTVTSAQKNPTAFYLCASSMLLGLHSGNTIYFGEGSWLTVVEDLNKVFPPEVAVFEPSEAEISHTQKATLVCLATGFFPDHVELSWWVNGKEVHSGVSTDPQPLKEQPALNDSRYCLSSRLRVSATFWQNPRNHFRCQVQFYGLSENDEWTQDRAKPVTQIVSAEAWGRADCGFTSVSYQQGVLSATILYEILLGKATLYAVLVSALVLMAMVKRKDF

SEQ ID NO: 911 - protein, 272 aa, Homo sapiens
MISLRVLLVILWLQLSWVWSQRKEVEQDPGPFNVPEGATVAFNCTYSNSASQSFFWYRQDCRKEPKLLMSVYSSGNEDGRFTAQLNRASQYISLLIRDSKLSDSATYLCVVREGNAGNMLTFGGGTRLMVKPHIQNPDPAVYQLRDSKSSDKSVCLFTDFDSQTNVSQSKDSDVYITDKTVLDMRSMDFKSNSAVAWSNKSDFACANAFNNSIIPEDTFFPSPESSCDVKLVEKSFETDTNLNFQNLSVIGFRILLLKVAGFNLLMTLRLWS

SEQ ID NO: 912 - protein, 312 aa, Homo sapiens
MDSWTFCCVSLCILVAKHTDAGVIQSPRHEVTEMGQEVTLRCKPISGHNSLFWYRQTMMRGLELLIYFNNNVPIDDSGMPEDRFSAKMPNASFSTLKIQPSEPRDSAVYFCASSLLTDSYEQYFGPGTRLTVTEDLKNVFPPEVAVFEPSEAEISHTQKATLVCLATGFYPDHVELSWWVNGKEVHSGVSTDPQPLKEQPALNDSRYCLSSRLRVSATFWQNPRNHFRCQVQFYGLSENDEWTQDRAKPVTQIVSAEAWGRADCGFTSESYQQGVLSATILYEILLGKATLYAVLVSALVLMAMVKRKDSRG

SEQ ID NO: 913 - protein, 275 aa, Homo sapiens
MLTASLLRAVIASICVVSSMAQKVTQAQTEISVVEKEDVTLDCVYETRDTTYYLFWYKQPPSGELVFLIRRNSFDEQNEISGRYSWNFQKSTSSFNFTITASQVVDSAVYFCALSEWGAGNMLTFGGGTRLMVKPHIQNPDPAVYQLRDSKSSDKSVCLFTDFDSQTNVSQSKDSDVYITDKTVLDMRSMDFKSNSAVAWSNKSDFACANAFNNSIIPEDTFFPSPESSCDVKLVEKSFETDTNLNFQNLSVIGFRILLLKVAGFNLLMTLRLWS

SEQ ID NO: 914 - protein, 311 aa, Homo sapiens
MGIRLLCRVAFCFLAVGLVDVKVTQSSRYLVKRTGEKVFLECVQDMDHENMFWYRQDPGLGLRLIYFSYDVKMKEKGDIPEGYSVSREKKERFSLILESASTNQTSMYLCASSFRTNSYEQYFGPGTRLTVTEDLKNVFPPEVAVFEPSEAEISHTQKATLVCLATGFYPDHVELSWWVNGKEVHSGVSTDPQPLKEQPALNDSRYCLSSRLRVSATFWQNPRNHFRCQVQFYGLSENDEWTQDRAKPVTQIVSAEAWGRADCGFTSESYQQGVLSATILYEILLGKATLYAVLVSALVLMAMVKRKDSRG

SEQ ID NO: 915 - protein, 273 aa, Homo sapiens
MISLRVLLVILWLQLSWVWSQRKEVEQDPGPFNVPEGATVAFNCTYSNSASQSFFWYRQDCRKEPKLLMSVYSSGNEDGRFTAQLNRASQYISLLIRDSKLSDSATYLCVVLGYGGSQGNLIFGKGTKLSVKPNIQNPDPAVYQLRDSKSSDKSVCLFTDFDSQTNVSQSKDSDVYITDKTVLDMRSMDFKSNSAVAWSNKSDFACANAFNNSIIPEDTFFPSPESSCDVKLVEKSFETDTNLNFQNLSVIGFRILLLKVAGFNLLMTLRLWS

SEQ ID NO: 916 - protein, 311 aa, Homo sapiens
MGPQLLGYVVLCLLGAGPLEAQVTQNPRYLITVTGKKLTVTCSQNMNHEYMSWYRQDPGLGLRQIYYSMNVEVTDKGDVPEGYKVSRKEKRNFPLILESPSPNQTSLYFCASSLSLVLSNEKLFFGSGTQLSVLEDLNKVFPPEVAVFEPSEAEISHTQKATLVCLATGFFPDHVELSWWVNGKEVHSGVSTDPQPLKEQPALNDSRYCLSSRLRVSATFWQNPRNHFRCQVQFYGLSENDEWTQDRAKPVTQIVSAEAWGRADCGFTSVSYQQGVLSATILYEILLGKATLYAVLVSALVLMAMVKRKDF

SEQ ID NO: 917 - protein, 272 aa, Homo sapiens
MALQSTLGAVWLGLLLNSLWKVAESKDQVFQPSTVASSEGAVVEIFCNHSVSNAYNFFWYLHFPGCAPRLLVKGSKPSQQGRYNMTYERFSSSLLILQVREADAAVYYCAVEDTGNTGKLIFGQGTTLQVKPDIQNPDPAVYQLRDSKSSDKSVCLFTDFDSQTNVSQSKDSDVYITDKTVLDMRSMDFKSNSAVAWSNKSDFACANAFNNSIIPEDTFFPSPESSCDVKLVEKSFETDTNLNFQNLSVIGFRILLLKVAGFNLLMTLRLWS

SEQ ID NO: 918 - protein, 311 aa, Homo sapiens
MGIRLLCRVAFCFLAVGLVDVKVTQSSRYLVKRTGEKVFLECVQDMDHENMFWYRQDPGLGLRLIYFSYDVKMKEKGDIPEGYSVSREKKERFSLILESASTNQTSMYLCASSLSSNSYEQYFGPGTRLTVTEDLKNVFPPEVAVFEPSEAEISHTQKATLVCLATGFYPDHVELSWWVNGKEVHSGVSTDPQPLKEQPALNDSRYCLSSRLRVSATFWQNPRNHFRCQVQFYGLSENDEWTQDRAKPVTQIVSAEAWGRADCGFTSESYQQGVLSATILYEILLGKATLYAVLVSALVLMAMVKRKDSRG

SEQ ID NO: 919 - protein, 311 aa, Homo sapiens
MGIRLLCRVAFCFLAVGLVDVKVTQSSRYLVKRTGEKVFLECVQDMDHENMFWYRQDPGLGLRLIYFSYDVKMKEKGDIPEGYSVSREKKERFSLILESASTNQTSMYLCASSLRTDSYEQYFGPGTRLTVTEDLKNVFPPEVAVFEPSEAEISHTQKATLVCLATGFYPDHVELSWWVNGKEVHSGVSTDPQPLKEQPALNDSRYCLSSRLRVSATFWQNPRNHFRCQVQFYGLSENDEWTQDRAKPVTQIVSAEAWGRADCGFTSESYQQGVLSATILYEILLGKATLYAVLVSALVLMAMVKRKDSRG

SEQ ID NO: 920 - protein, 275 aa, Homo sapiens
MMKCPQALLAIFWLLLSWVSSEDKVVQSPLSLVVHEGDTVTLNCSYEVTNFRSLLWYKQEKKAPTFLFMLTSSGIEKKSGRLSSILDKKELSSILNITATQTGDSAIYLCAGYMYSGGGADGLTFGKGTHLIIQPYIQNPDPAVYQLRDSKSSDKSVCLFTDFDSQTNVSQSKDSDVYITDKTVLDMRSMDFKSNSAVAWSNKSDFACANAFNNSIIPEDTFFPSPESSCDVKLVEKSFETDTNLNFQNLSVIGFRILLLKVAGFNLLMTLRLWS

SEQ ID NO: 921 - protein, 313 aa, Homo sapiens
MGCRLLCCVVFCLLQAGPLDTAVSQTPKYLVTQMGNDKSIKCEQNLGHDTMYWYKQDSKKFLKIMFSYNNKELIINETVPNRFSPKSPDKAHLNLHINSLELGDSAVYFCASSQVLDITQETQYFGPGTRLLVLEDLKNVFPPEVAVFEPSEAEISHTQKATLVCLATGFYPDHVELSWWVNGKEVHSGVSTDPQPLKEQPALNDSRYCLSSRLRVSATFWQNPRNHFRCQVQFYGLSENDEWTQDRAKPVTQIVSAEAWGRADCGFTSESYQQGVLSATILYEILLGKATLYAVLVSALVLMAMVKRKDSRG

SEQ ID NO: 922 - protein, 273 aa, Homo sapiens
METLLGLLILWLQLQWVSSKQEVTQIPAALSVPEGENLVLNCSFTDSAIYNLQWFRQDPGKGLTSLLLIQSSQREQTSGRLNASLDKSSGRSTLYIAASQPGDSATYLCAVTNSGGSNYKLTFGKGTLLTVNPNIQNPDPAVYQLRDSKSSDKSVCLFTDFDSQTNVSQSKDSDVYITDKTVLDMRSMDFKSNSAVAWSNKSDFACANAFNNSIIPEDTFFPSPESSCDVKLVEKSFETDTNLNFQNLSVIGFRILLLKVAGFNLLMTLRLWS

SEQ ID NO: 923 - protein, 311 aa, Homo sapiens
MGTRLFFYVALCLLWTGHMDAGITQSPRHKVTETGTPVTLRCHQTENHRYMYWYRQDPGHGLRLIHYSYGVKDTDKGEVSDGYSVSRSKTEDFLLTLESATSSQTSVYFCAIRDNRRLSGNTIYFGEGSWLTVVEDLNKVFPPEVAVFEPSEAEISHTQKATLVCLATGFFPDHVELSWWVNGKEVHSGVSTDPQPLKEQPALNDSRYCLSSRLRVSATFWQNPRNHFRCQVQFYGLSENDEWTQDRAKPVTQIVSAEAWGRADCGFTSVSYQQGVLSATILYEILLGKATLYAVLVSALVLMAMVKRKDF

SEQ ID NO: 924 - protein, 269 aa, Homo sapiens
MKPTLISVLVIIFILRGTRAQRVTQPEKLLSVFKGAPVELKCNYSYSGSPELFWYVQYSRQRLQLLLRHISRESIKGFTADLNKGETSFHLKKPFAQEEDSAMYYCALDDSWGKLQFEFGAGTQVVVTPDIQNPDPAVYQLRDSKSSDKSVCLFTDFDSQTNVSQSKDSDVYITDKTVLDMRSMDFKSNSAVAWSNKSDFACANAFNNSIIPEDTFFPSPESSCDVKLVEKSFETDTNLNFQNLSVIGFRILLLKVAGFNLLMTLRLWS

SEQ ID NO: 925 - protein, 306 aa, Homo sapiens
MSNQVLCCVVLCFLGANTVDGGITQSPKYLFRKEGQNVTLSCEQNLNHDAMYWYRQDPGQGLRLIYYSQIVNDFQKGDIAEGYSVSREKKESFPLTVTSAQKNPTAFYLCASRAGNGYTFGSGTRLTVVEDLNKVFPPEVAVFEPSEAEISHTQKATLVCLATGFFPDHVELSWWVNGKEVHSGVSTDPQPLKEQPALNDSRYCLSSRLRVSATFWQNPRNHFRCQVQFYGLSENDEWTQDRAKPVTQIVSAEAWGRADCGFTSVSYQQGVLSATILYEILLGKATLYAVLVSALVLMAMVKRKDF

SEQ ID NO: 926 - protein, 273 aa, Homo sapiens
MNYSPGLVSLILLLLGRTRGNSVTQMEGPVTLSEEAFLTINCTYTATGYPSLFWYVQYPGEGLQLLLKATKADDKGSNKGFEATYRKETTSFHLEKGSVQVSDSAVYFCALSDGAQAGTALIFGKGTTLSVSSNIQNPDPAVYQLRDSKSSDKSVCLFTDFDSQTNVSQSKDSDVYITDKTVLDMRSMDFKSNSAVAWSNKSDFACANAFNNSIIPEDTFFPSPESSCDVKLVEKSFETDTNLNFQNLSVIGFRILLLKVAGFNLLMTLRLWS

SEQ ID NO: 927 - protein, 311 aa, Homo sapiens
MGIRLLCRVAFCFLAVGLVDVKVTQSSRYLVKRTGEKVFLECVQDMDHENMFWYRQDPGLGLRLIYFSYDVKMKEKGDIPEGYSVSREKKERFSLILESASTNQTSMYLCASSLHRDSYEQYFGPGTRLTVTEDLKNVFPPEVAVFEPSEAEISHTQKATLVCLATGFYPDHVELSWWVNGKEVHSGVSTDPQPLKEQPALNDSRYCLSSRLRVSATFWQNPRNHFRCQVQFYGLSENDEWTQDRAKPVTQIVSAEAWGRADCGFTSESYQQGVLSATILYEILLGKATLYAVLVSALVLMAMVKRKDSRG

SEQ ID NO: 928 - protein, 273 aa, Homo sapiens
MISLRVLLVILWLQLSWVWSQRKEVEQDPGPFNVPEGATVAFNCTYSNSASQSFFWYRQDCRKEPKLLMSVYSSGNEDGRFTAQLNRASQYISLLIRDSKLSDSATYLCVVRSDSWGKFQFEFGAGTQVVVTPDIQNPDPAVYQLRDSKSSDKSVCLFTDFDSQTNVSQSKDSDVYITDKTVLDMRSMDFKSNSAVAWSNKSDFACANAFNNSIIPEDTFFPSPESSCDVKLVEKSFETDTNLNFQNLSVIGFRILLLKVAGFNLLMTLRLWS

SEQ ID NO: 929 - protein, 269 aa, Homo sapiens
MASAPISMLAMLFTLSGLRAQSVAQPEDQVNVAEGNPLTVKCTYSVSGNPYLFWYVQYPNRGLQFLLKYITGDNLVKGSYGFEAEFNKSQTSFHLKKPSALVSDSALYFCAVRDDKLSFGAGTTVTVRANIQNPDPAVYQLRDSKSSDKSVCLFTDFDSQTNVSQSKDSDVYITDKTVLDMRSMDFKSNSAVAWSNKSDFACANAFNNSIIPEDTFFPSPESSCDVKLVEKSFETDTNLNFQNLSVIGFRILLLKVAGFNLLMTLRLWS

SEQ ID NO: 930 - protein, 312 aa, Homo sapiens
MSIGLLCCAALSLLWAGPVNAGVTQTPKFQVLKTGQSMTLQCAQDMNHEYMSWYRQDPGMGLRLIHYSVGAGITDQGEVPNGYNVSRSTTEDFPLRLLSAAPSQTSVYFCASSYSYGTDYEQYFGPGTRLTVTEDLKNVFPPEVAVFEPSEAEISHTQKATLVCLATGFYPDHVELSWWVNGKEVHSGVSTDPQPLKEQPALNDSRYCLSSRLRVSATFWQNPRNHFRCQVQFYGLSENDEWTQDRAKPVTQIVSAEAWGRADCGFTSESYQQGVLSATILYEILLGKATLYAVLVSALVLMAMVKRKDSRG

SEQ ID NO: 931 - protein, 273 aa, Homo sapiens
MTSIRAVFIFLWLQLDLVNGENVEQHPSTLSVQEGDSAVIKCTYSDSASNYFPWYKQELGKGPQLIIDIRSNVGEKKDQRIAVTLNKTAKHFSLHITETQPEDSAVYFCAAYVLSGGYNKLIFGAGTRLAVHPYIQNPDPAVYQLRDSKSSDKSVCLFTDFDSQTNVSQSKDSDVYITDKTVLDMRSMDFKSNSAVAWSNKSDFACANAFNNSIIPEDTFFPSPESSCDVKLVEKSFETDTNLNFQNLSVIGFRILLLKVAGFNLLMTLRLWS

SEQ ID NO: 932 - protein, 310 aa, Homo sapiens
MSLGLLCCGAFSLLWAGPVNAGVTQTPKFRVLKTGQSMTLLCAQDMNHEYMYWYRQDPGMGLRLIHYSVGEGTTAKGEVPDGYNVSRLKKQNFLLGLESAAPSQTSVYFCASSPGGAGNQPQHFGDGTRLSILEDLNKVFPPEVAVFEPSEAEISHTQKATLVCLATGFFPDHVELSWWVNGKEVHSGVSTDPQPLKEQPALNDSRYCLSSRLRVSATFWQNPRNHFRCQVQFYGLSENDEWTQDRAKPVTQIVSAEAWGRADCGFTSVSYQQGVLSATILYEILLGKATLYAVLVSALVLMAMVKRKDF

SEQ ID NO: 933 - protein, 273 aa, Homo sapiens
MASAPISMLAMLFTLSGLRAQSVAQPEDQVNVAEGNPLTVKCTYSVSGNPYLFWYVQYPNRGLQFLLKYITGDNLVKGSYGFEAEFNKSQTSFHLKKPSALVSDSALYFCAVRDYNQGGKLIFGQGTELSVKPNIQNPDPAVYQLRDSKSSDKSVCLFTDFDSQTNVSQSKDSDVYITDKTVLDMRSMDFKSNSAVAWSNKSDFACANAFNNSIIPEDTFFPSPESSCDVKLVEKSFETDTNLNFQNLSVIGFRILLLKVAGFNLLMTLRLWS

SEQ ID NO: 934 - protein, 308 aa, Homo sapiens
MSNQVLCCVVLCFLGANTVDGGITQSPKYLFRKEGQNVTLSCEQNLNHDAMYWYRQDPGQGLRLIYYSQIVNDFQKGDIAEGYSVSREKKESFPLTVTSAQKNPTAFYLCASSGGYRVRAFFGQGTRLTVVEDLNKVFPPEVAVFEPSEAEISHTQKATLVCLATGFFPDHVELSWWVNGKEVHSGVSTDPQPLKEQPALNDSRYCLSSRLRVSATFWQNPRNHFRCQVQFYGLSENDEWTQDRAKPVTQIVSAEAWGRADCGFTSVSYQQGVLSATILYEILLGKATLYAVLVSALVLMAMVKRKDF

SEQ ID NO: 935 - protein, 277 aa, Homo sapiens
MLTASLLRAVIASICVVSSMAQKVTQAQTEISVVEKEDVTLDCVYETRDTTYYLFWYKQPPSGELVFLIRRNSFDEQNEISGRYSWNFQKSTSSFNFTITASQVVDSAVYFCALSPQPTTGANNLFFGTGTRLTVIPYIQNPDPAVYQLRDSKSSDKSVCLFTDFDSQTNVSQSKDSDVYITDKTVLDMRSMDFKSNSAVAWSNKSDFACANAFNNSIIPEDTFFPSPESSCDVKLVEKSFETDTNLNFQNLSVIGFRILLLKVAGFNLLMTLRLWS

SEQ ID NO: 936 - protein, 311 aa, Homo sapiens
MGSRLLCWVLLCLLGAGPVKAGVTQTPRYLIKTRGQQVTLSCSPISGHRSVSWYQQTPGQGLQFLFEYFSETQRNKGNFPGRFSGRQFSNSRSEMNVSTLELGDSALYLCASGSFASTDTQYFGPGTRLTVLEDLKNVFPPEVAVFEPSEAEISHTQKATLVCLATGFYPDHVELSWWVNGKEVHSGVSTDPQPLKEQPALNDSRYCLSSRLRVSATFWQNPRNHFRCQVQFYGLSENDEWTQDRAKPVTQIVSAEAWGRADCGFTSESYQQGVLSATILYEILLGKATLYAVLVSALVLMAMVKRKDSRG

SEQ ID NO: 937 - protein, 9 aa, Severe acute respiratory syndrome coronavirus 2
ATSRTLSYY

SEQ ID NO: 938 - protein, 276 aa, Homo sapiens
MEKNPLAAPLLILWFHLDCVSSILNVEQSPQSLHVQEGDSTNFTCSFPSSNFYALHWYRWETAKSPEALFVMTLNGDEKKKGRISATLNTKEGYSYLYIKGSQPEDSATYLCASTNYGGSQGNLIFGKGTKLSVKPNIQNPDPAVYQLRDSKSSDKSVCLFTDFDSQTNVSQSKDSDVYITDKTVLDMRSMDFKSNSAVAWSNKSDFACANAFNNSIIPEDTFFPSPESSCDVKLVEKSFETDTNLNFQNLSVIGFRILLLKVAGFNLLMTLRLWS

SEQ ID NO: 939 - protein, 310 aa, Homo sapiens
MSIGLLCCAALSLLWAGPVNAGVTQTPKFQVLKTGQSMTLQCAQDMNHEYMSWYRQDPGMGLRLIHYSVGAGITDQGEVPNGYNVSRSTTEDFPLRLLSAAPSQTSVYFCASSLGQGAPYGYTFGSGTRLTVVEDLNKVFPPEVAVFEPSEAEISHTQKATLVCLATGFFPDHVELSWWVNGKEVHSGVSTDPQPLKEQPALNDSRYCLSSRLRVSATFWQNPRNHFRCQVQFYGLSENDEWTQDRAKPVTQIVSAEAWGRADCGFTSVSYQQGVLSATILYEILLGKATLYAVLVSALVLMAMVKRKDF

SEQ ID NO: 940 - protein, 272 aa, Homo sapiens
MTSIRAVFIFLWLQLDLVNGENVEQHPSTLSVQEGDSAVIKCTYSDSASNYFPWYKQELGKGPQLIIDIRSNVGEKKDQRIAVTLNKTAKHFSLHITETQPEDSAVYFCAAHILSNDYKLSFGAGTTVTVRANIQNPDPAVYQLRDSKSSDKSVCLFTDFDSQTNVSQSKDSDVYITDKTVLDMRSMDFKSNSAVAWSNKSDFACANAFNNSIIPEDTFFPSPESSCDVKLVEKSFETDTNLNFQNLSVIGFRILLLKVAGFNLLMTLRLWS

SEQ ID NO: 941 - protein, 312 aa, Homo sapiens
MSIGLLCCVAFSLLWASPVNAGVTQTPKFQVLKTGQSMTLQCAQDMNHNSMYWYRQDPGMGLRLIYYSASEGTTDKGEVPNGYNVSRLNKREFSLRLESAAPSQTSVYFCASSDELDRGDGNTIYFGEGSWLTVVEDLNKVFPPEVAVFEPSEAEISHTQKATLVCLATGFFPDHVELSWWVNGKEVHSGVSTDPQPLKEQPALNDSRYCLSSRLRVSATFWQNPRNHFRCQVQFYGLSENDEWTQDRAKPVTQIVSAEAWGRADCGFTSVSYQQGVLSATILYEILLGKATLYAVLVSALVLMAMVKRKDF

SEQ ID NO: 942 - protein, 276 aa, Homo sapiens
MKKLLAMILWLQLDRLSGELKVEQNPLFLSMQEGKNYTIYCNYSTTSDRLYWYRQDPGKSLESLFVLLSNGAVKQEGRLMASLDTKARLSTLHITAAVHDLSATYFCAVDVSGETEVMDSNYQLIWGAGTKLIIKPDIQNPDPAVYQLRDSKSSDKSVCLFTDFDSQTNVSQSKDSDVYITDKTVLDMRSMDFKSNSAVAWSNKSDFACANAFNNSIIPEDTFFPSPESSCDVKLVEKSFETDTNLNFQNLSVIGFRILLLKVAGFNLLMTLRLWS

SEQ ID NO: 943 - protein, 314 aa, Homo sapiens
MGCRLLCCAVLCLLGAVPMETGVTQTPRHLVMGMTNKKSLKCEQHLGHNAMYWYKQSAKKPLELMFVYNFKEQTENNSVPSRFSPECPNSSHLFLHLHTLQPEDSALYLCASSQDPLAGDYNEQFFGPGTRLTVLEDLKNVFPPEVAVFEPSEAEISHTQKATLVCLATGFYPDHVELSWWVNGKEVHSGVSTDPQPLKEQPALNDSRYCLSSRLRVSATFWQNPRNHFRCQVQFYGLSENDEWTQDRAKPVTQIVSAEAWGRADCGFTSESYQQGVLSATILYEILLGKATLYAVLVSALVLMAMVKRKDSRG

SEQ ID NO: 944 - protein, 271 aa, Homo sapiens
MTSIRAVFIFLWLQLDLVNGENVEQHPSTLSVQEGDSAVIKCTYSDSASNYFPWYKQELGKGPQLIIDIRSNVGEKKDQRIAVTLNKTAKHFSLHITETQPEDSAVYFCAATPGGSYIPTFGRGTSLIVHPYIQNPDPAVYQLRDSKSSDKSVCLFTDFDSQTNVSQSKDSDVYITDKTVLDMRSMDFKSNSAVAWSNKSDFACANAFNNSIIPEDTFFPSPESSCDVKLVEKSFETDTNLNFQNLSVIGFRILLLKVAGFNLLMTLRLWS

SEQ ID NO: 945 - protein, 309 aa, Homo sapiens
MGFRLLCCVAFCLLGAGPVDSGVTQTPKHLITATGQRVTLRCSPRSGDLSVYWYQQSLDQGLQFLIQYYNGEERAKGNILERFSAQQFPDLHSELNLSSLELGDSALYFCASSVVADTQYFGPGTRLTVLEDLKNVFPPEVAVFEPSEAEISHTQKATLVCLATGFYPDHVELSWWVNGKEVHSGVSTDPQPLKEQPALNDSRYCLSSRLRVSATFWQNPRNHFRCQVQFYGLSENDEWTQDRAKPVTQIVSAEAWGRADCGFTSESYQQGVLSATILYEILLGKATLYAVLVSALVLMAMVKRKDSRG

SEQ ID NO: 946 - protein, 9 aa, Severe acute respiratory syndrome coronavirus 2
KTFPPTEPK

SEQ ID NO: 947 - protein, 272 aa, Homo sapiens
MKSLRVLLVILWLQLSWVWSQQKEVEQNSGPLSVPEGAIASLNCTYSDRGSQSFFWYRQYSGKSPELIMFIYSNGDKEDGRFTAQLNKASQYVSLLIRDSQPSDSATYLCAVSLRGNTPLVFGKGTRLSVIANIQNPDPAVYQLRDSKSSDKSVCLFTDFDSQTNVSQSKDSDVYITDKTVLDMRSMDFKSNSAVAWSNKSDFACANAFNNSIIPEDTFFPSPESSCDVKLVEKSFETDTNLNFQNLSVIGFRILLLKVAGFNLLMTLRLWS

SEQ ID NO: 948 - protein, 310 aa, Homo sapiens
MGTRLLCWVVLGFLGTDHTGAGVSQSPRYKVAKRGQDVALRCDPISGHVSLFWYQQALGQGPEFLTYFQNEAQLDKSGLPSDRFFAERPEGSVSTLKIQRTQQEDSAVYLCASTLGLNTQYFGPGTRLTVLEDLKNVFPPEVAVFEPSEAEISHTQKATLVCLATGFYPDHVELSWWVNGKEVHSGVSTDPQPLKEQPALNDSRYCLSSRLRVSATFWQNPRNHFRCQVQFYGLSENDEWTQDRAKPVTQIVSAEAWGRADCGFTSESYQQGVLSATILYEILLGKATLYAVLVSALVLMAMVKRKDSRG

SEQ ID NO: 949 - protein, 274 aa, Homo sapiens
MLLLLVPVLEVIFTLGGTRAQSVTQLDSHVSVSEGTPVLLRCNYSSSYSPSLFWYVQHPNKGLQLLLKYTSAATLVKGINGFEAEFKKSETSFHLTKPSAHMSDAAEYFCVVSDKDSGNTPLVFGKGTRLSVIANIQNPDPAVYQLRDSKSSDKSVCLFTDFDSQTNVSQSKDSDVYITDKTVLDMRSMDFKSNSAVAWSNKSDFACANAFNNSIIPEDTFFPSPESSCDVKLVEKSFETDTNLNFQNLSVIGFRILLLKVAGFNLLMTLRLWS

SEQ ID NO: 950 - protein, 313 aa, Homo sapiens
MGTRLFFYVALCLLWTGHMDAGITQSPRHKVTETGTPVTLRCHQTENHRYMYWYRQDPGHGLRLIHYSYGVKDTDKGEVSDGYSVSRSKTEDFLLTLESATSSQTSVYFCATKGLAGESYNEQFFGPGTRLTVLEDLKNVFPPEVAVFEPSEAEISHTQKATLVCLATGFYPDHVELSWWVNGKEVHSGVSTDPQPLKEQPALNDSRYCLSSRLRVSATFWQNPRNHFRCQVQFYGLSENDEWTQDRAKPVTQIVSAEAWGRADCGFTSESYQQGVLSATILYEILLGKATLYAVLVSALVLMAMVKRKDSRG

SEQ ID NO: 951 - protein, 273 aa, Homo sapiens
MASAPISMLAMLFTLSGLRAQSVAQPEDQVNVAEGNPLTVKCTYSVSGNPYLFWYVQYPNRGLQFLLKYITGDNLVKGSYGFEAEFNKSQTSFHLKKPSALVSDSALYFCAVRDRGGSYIPTFGRGTSLIVHPYIQNPDPAVYQLRDSKSSDKSVCLFTDFDSQTNVSQSKDSDVYITDKTVLDMRSMDFKSNSAVAWSNKSDFACANAFNNSIIPEDTFFPSPESSCDVKLVEKSFETDTNLNFQNLSVIGFRILLLKVAGFNLLMTLRLWS

SEQ ID NO: 952 - protein, 311 aa, Homo sapiens
MSIGLLCCVAFSLLWASPVNAGVTQTPKFQVLKTGQSMTLQCAQDMNHNSMYWYRQDPGMGLRLIYYSASEGTTDKGEVPNGYNVSRLNKREFSLRLESAAPSQTSVYFCASSEAVGQGNQPQHFGDGTRLSILEDLNKVFPPEVAVFEPSEAEISHTQKATLVCLATGFFPDHVELSWWVNGKEVHSGVSTDPQPLKEQPALNDSRYCLSSRLRVSATFWQNPRNHFRCQVQFYGLSENDEWTQDRAKPVTQIVSAEAWGRADCGFTSVSYQQGVLSATILYEILLGKATLYAVLVSALVLMAMVKRKDF

SEQ ID NO: 953 - protein, 275 aa, Homo sapiens
MNYSPGLVSLILLLLGRTRGNSVTQMEGPVTLSEEAFLTINCTYTATGYPSLFWYVQYPGEGLQLLLKATKADDKGSNKGFEATYRKETTSFHLEKGSVQVSDSAVYFCAHPSSDASGGSYIPTFGRGTSLIVHPYIQNPDPAVYQLRDSKSSDKSVCLFTDFDSQTNVSQSKDSDVYITDKTVLDMRSMDFKSNSAVAWSNKSDFACANAFNNSIIPEDTFFPSPESSCDVKLVEKSFETDTNLNFQNLSVIGFRILLLKVAGFNLLMTLRLWS

SEQ ID NO: 954 - protein, 283 aa, Homo sapiens
MEKNPLAAPLLILWFHLDCVSSILNVEQSPQSLHVQEGDSTNFTCSFPSSNFYALHWYRWETAKSPEALFVMTLNGDEKKKGRISATLNTKEGYSYLYIKGSQPEDSATYLCAPYPPIGFGNVLHCFGNVLHCGSGTQVIVLPHIQNPDPAVYQLRDSKSSDKSVCLFTDFDSQTNVSQSKDSDVYITDKTVLDMRSMDFKSNSAVAWSNKSDFACANAFNNSIIPEDTFFPSPESSCDVKLVEKSFETDTNLNFQNLSVIGFRILLLKVAGFNLLMTLRLWS

SEQ ID NO: 955 - protein, 310 aa, Homo sapiens
MSNQVLCCVVLCFLGANTVDGGITQSPKYLFRKEGQNVTLSCEQNLNHDAMYWYRQDPGQGLRLIYYSQIVNDFQKGDIAEGYSVSREKKESFPLTVTSAQKNPTAFYLCASSSRTKDEQYFGPGTRLTVTEDLKNVFPPEVAVFEPSEAEISHTQKATLVCLATGFYPDHVELSWWVNGKEVHSGVSTDPQPLKEQPALNDSRYCLSSRLRVSATFWQNPRNHFRCQVQFYGLSENDEWTQDRAKPVTQIVSAEAWGRADCGFTSESYQQGVLSATILYEILLGKATLYAVLVSALVLMAMVKRKDSRG

SEQ ID NO: 956 - protein, 272 aa, Homo sapiens
MLLLLIPVLGMIFALRDARAQSVSQHNHHVILSEAASLELGCNYSYGGTVNLFWYVQYPGQHLQLLLKYFSGDPLVKGIKGFEAEFIKSKFSFNLRKPSVQWSDTAEYFCAVNRDSNYQLIWGAGTKLIIKPDIQNPDPAVYQLRDSKSSDKSVCLFTDFDSQTNVSQSKDSDVYITDKTVLDMRSMDFKSNSAVAWSNKSDFACANAFNNSIIPEDTFFPSPESSCDVKLVEKSFETDTNLNFQNLSVIGFRILLLKVAGFNLLMTLRLWS

SEQ ID NO: 957 - protein, 310 aa, Homo sapiens
MGCRLLCCAVLCLLGAVPMETGVTQTPRHLVMGMTNKKSLKCEQHLGHNAMYWYKQSAKKPLELMFVYNFKEQTENNSVPSRFSPECPNSSHLFLHLHTLQPEDSALYLCASSQGPKDEQYFGPGTRLTVTEDLKNVFPPEVAVFEPSEAEISHTQKATLVCLATGFYPDHVELSWWVNGKEVHSGVSTDPQPLKEQPALNDSRYCLSSRLRVSATFWQNPRNHFRCQVQFYGLSENDEWTQDRAKPVTQIVSAEAWGRADCGFTSESYQQGVLSATILYEILLGKATLYAVLVSALVLMAMVKRKDSRG

SEQ ID NO: 958 - protein, 9 aa, Severe acute respiratory syndrome coronavirus 2
KCYGVSPTK

SEQ ID NO: 959 - protein, 271 aa, Homo sapiens
MTSIRAVFIFLWLQLDLVNGENVEQHPSTLSVQEGDSAVIKCTYSDSASNYFPWYKQELGKGPQLIIDIRSNVGEKKDQRIAVTLNKTAKHFSLHITETQPEDSAVYFCAARTGGSYIPTFGRGTSLIVHPYIQNPDPAVYQLRDSKSSDKSVCLFTDFDSQTNVSQSKDSDVYITDKTVLDMRSMDFKSNSAVAWSNKSDFACANAFNNSIIPEDTFFPSPESSCDVKLVEKSFETDTNLNFQNLSVIGFRILLLKVAGFNLLMTLRLWS

SEQ ID NO: 960 - protein, 309 aa, Homo sapiens
MTIRLLCYMGFYFLGAGLMEADIYQTPRYLVIGTGKKITLECSQTMGHDKMYWYQQDPGMELHLIHYSYGVNSTEKGDLSSESTVSRIRTEHFPLTLESARPSHTSQYLCASSGDRKDSPLHFGNGTRLTVTEDLNKVFPPEVAVFEPSEAEISHTQKATLVCLATGFFPDHVELSWWVNGKEVHSGVSTDPQPLKEQPALNDSRYCLSSRLRVSATFWQNPRNHFRCQVQFYGLSENDEWTQDRAKPVTQIVSAEAWGRADCGFTSVSYQQGVLSATILYEILLGKATLYAVLVSALVLMAMVKRKDF

SEQ ID NO: 961 - protein, 274 aa, Homo sapiens
MLLLLVPVLEVIFTLGGTRAQSVTQLDSHVSVSEGTPVLLRCNYSSSYSPSLFWYVQHPNKGLQLLLKYTSAATLVKGINGFEAEFKKSETSFHLTKPSAHMSDAAEYFCVVSDPQTGRRALTFGSGTRLQVQPNIQNPDPAVYQLRDSKSSDKSVCLFTDFDSQTNVSQSKDSDVYITDKTVLDMRSMDFKSNSAVAWSNKSDFACANAFNNSIIPEDTFFPSPESSCDVKLVEKSFETDTNLNFQNLSVIGFRILLLKVAGFNLLMTLRLWS

SEQ ID NO: 962 - protein, 10 aa, Severe acute respiratory syndrome coronavirus 2
MVTNNTFTLK

SEQ ID NO: 963 - protein, 269 aa, Homo sapiens
MMKCPQALLAIFWLLLSWVSSEDKVVQSPLSLVVHEGDTVTLNCSYEVTNFRSLLWYKQEKKAPTFLFMLTSSGIEKKSGRLSSILDKKELSSILNITATQTGDSAIYLCAVRGNQFYFGTGTSLTVIPNIQNPDPAVYQLRDSKSSDKSVCLFTDFDSQTNVSQSKDSDVYITDKTVLDMRSMDFKSNSAVAWSNKSDFACANAFNNSIIPEDTFFPSPESSCDVKLVEKSFETDTNLNFQNLSVIGFRILLLKVAGFNLLMTLRLWS

SEQ ID NO: 964 - protein, 311 aa, Homo sapiens
MGTRLFFYVALCLLWTGHMDAGITQSPRHKVTETGTPVTLRCHQTENHRYMYWYRQDPGHGLRLIHYSYGVKDTDKGEVSDGYSVSRSKTEDFLLTLESATSSQTSVYFCAISDTPSGGPYGYTFGSGTRLTVVEDLNKVFPPEVAVFEPSEAEISHTQKATLVCLATGFFPDHVELSWWVNGKEVHSGVSTDPQPLKEQPALNDSRYCLSSRLRVSATFWQNPRNHFRCQVQFYGLSENDEWTQDRAKPVTQIVSAEAWGRADCGFTSVSYQQGVLSATILYEILLGKATLYAVLVSALVLMAMVKRKDF

SEQ ID NO: 965 - protein, 272 aa, Homo sapiens
MISLRVLLVILWLQLSWVWSQRKEVEQDPGPFNVPEGATVAFNCTYSNSASQSFFWYRQDCRKEPKLLMSVYSSGNEDGRFTAQLNRASQYISLLIRDSKLSDSATYLCVVKARDSNYQLIWGAGTKLIIKPDIQNPDPAVYQLRDSKSSDKSVCLFTDFDSQTNVSQSKDSDVYITDKTVLDMRSMDFKSNSAVAWSNKSDFACANAFNNSIIPEDTFFPSPESSCDVKLVEKSFETDTNLNFQNLSVIGFRILLLKVAGFNLLMTLRLWS

SEQ ID NO: 966 - protein, 312 aa, Homo sapiens
MGFRLLCCVAFCLLGAGPVDSGVTQTPKHLITATGQRVTLRCSPRSGDLSVYWYQQSLDQGLQFLIQYYNGEERAKGNILERFSAQQFPDLHSELNLSSLELGDSALYFCASSVDGGTYNEQFFGPGTRLTVLEDLKNVFPPEVAVFEPSEAEISHTQKATLVCLATGFYPDHVELSWWVNGKEVHSGVSTDPQPLKEQPALNDSRYCLSSRLRVSATFWQNPRNHFRCQVQFYGLSENDEWTQDRAKPVTQIVSAEAWGRADCGFTSESYQQGVLSATILYEILLGKATLYAVLVSALVLMAMVKRKDSRG

SEQ ID NO: 967 - protein, 271 aa, Homo sapiens
MISLRVLLVILWLQLSWVWSQRKEVEQDPGPFNVPEGATVAFNCTYSNSASQSFFWYRQDCRKEPKLLMSVYSSGNEDGRFTAQLNRASQYISLLIRDSKLSDSATYLCVVRPPGNYQLIWGAGTKLIIKPDIQNPDPAVYQLRDSKSSDKSVCLFTDFDSQTNVSQSKDSDVYITDKTVLDMRSMDFKSNSAVAWSNKSDFACANAFNNSIIPEDTFFPSPESSCDVKLVEKSFETDTNLNFQNLSVIGFRILLLKVAGFNLLMTLRLWS

SEQ ID NO: 968 - protein, 312 aa, Homo sapiens
MGFRLLCCVAFCLLGAGPVDSGVTQTPKHLITATGQRVTLRCSPRSGDLSVYWYQQSLDQGLQFLIQYYNGEERAKGNILERFSAQQFPDLHSELNLSSLELGDSALYFCASSVSSGSGETQYFGPGTRLLVLEDLKNVFPPEVAVFEPSEAEISHTQKATLVCLATGFYPDHVELSWWVNGKEVHSGVSTDPQPLKEQPALNDSRYCLSSRLRVSATFWQNPRNHFRCQVQFYGLSENDEWTQDRAKPVTQIVSAEAWGRADCGFTSESYQQGVLSATILYEILLGKATLYAVLVSALVLMAMVKRKDSRG

SEQ ID NO: 969 - protein, 272 aa, Homo sapiens
MISLRVLLVILWLQLSWVWSQRKEVEQDPGPFNVPEGATVAFNCTYSNSASQSFFWYRQDCRKEPKLLMSVYSSGNEDGRFTAQLNRASQYISLLIRDSKLSDSATYLCVVNSRDSGYALNFGKGTSLLVTPHIQNPDPAVYQLRDSKSSDKSVCLFTDFDSQTNVSQSKDSDVYITDKTVLDMRSMDFKSNSAVAWSNKSDFACANAFNNSIIPEDTFFPSPESSCDVKLVEKSFETDTNLNFQNLSVIGFRILLLKVAGFNLLMTLRLWS

SEQ ID NO: 970 - protein, 310 aa, Homo sapiens
MGFRLLCCVAFCLLGAGPVDSGVTQTPKHLITATGQRVTLRCSPRSGDLSVYWYQQSLDQGLQFLIQYYNGEERAKGNILERFSAQQFPDLHSELNLSSLELGDSALYFCASSVDGAPGVGYTFGSGTRLTVVEDLNKVFPPEVAVFEPSEAEISHTQKATLVCLATGFFPDHVELSWWVNGKEVHSGVSTDPQPLKEQPALNDSRYCLSSRLRVSATFWQNPRNHFRCQVQFYGLSENDEWTQDRAKPVTQIVSAEAWGRADCGFTSVSYQQGVLSATILYEILLGKATLYAVLVSALVLMAMVKRKDF

SEQ ID NO: 971 - protein, 272 aa, Homo sapiens
MISLRVLLVILWLQLSWVWSQRKEVEQDPGPFNVPEGATVAFNCTYSNSASQSFFWYRQDCRKEPKLLMSVYSSGNEDGRFTAQLNRASQYISLLIRDSKLSDSATYLCVVKGRDSNYQLIWGAGTKLIIKPDIQNPDPAVYQLRDSKSSDKSVCLFTDFDSQTNVSQSKDSDVYITDKTVLDMRSMDFKSNSAVAWSNKSDFACANAFNNSIIPEDTFFPSPESSCDVKLVEKSFETDTNLNFQNLSVIGFRILLLKVAGFNLLMTLRLWS

SEQ ID NO: 972 - protein, 312 aa, Homo sapiens
MGFRLLCCVAFCLLGAGPVDSGVTQTPKHLITATGQRVTLRCSPRSGDLSVYWYQQSLDQGLQFLIQYYNGEERAKGNILERFSAQQFPDLHSELNLSSLELGDSALYFCASSVDSGSYNEQFFGPGTRLTVLEDLKNVFPPEVAVFEPSEAEISHTQKATLVCLATGFYPDHVELSWWVNGKEVHSGVSTDPQPLKEQPALNDSRYCLSSRLRVSATFWQNPRNHFRCQVQFYGLSENDEWTQDRAKPVTQIVSAEAWGRADCGFTSESYQQGVLSATILYEILLGKATLYAVLVSALVLMAMVKRKDSRG

SEQ ID NO: 973 - protein, 278 aa, Homo sapiens
MACPGFLWALVISTCLEFSMAQTVTQSQPEMSVQEAETVTLSCTYDTSESDYYLFWYKQPPSRQMILVIRQEAYKQQNATENRFSVNFQKAAKSFSLKISDSQLGDAAMYFCAYRSAVYQGGSEKLVFGKGTKLTVNPYIQNPDPAVYQLRDSKSSDKSVCLFTDFDSQTNVSQSKDSDVYITDKTVLDMRSMDFKSNSAVAWSNKSDFACANAFNNSIIPEDTFFPSPESSCDVKLVEKSFETDTNLNFQNLSVIGFRILLLKVAGFNLLMTLRLWS

SEQ ID NO: 974 - protein, 312 aa, Homo sapiens
MSNQVLCCVVLCFLGANTVDGGITQSPKYLFRKEGQNVTLSCEQNLNHDAMYWYRQDPGQGLRLIYYSQIVNDFQKGDIAEGYSVSREKKESFPLTVTSAQKNPTAFYLCASSISSSGSNEQFFGPGTRLTVLEDLKNVFPPEVAVFEPSEAEISHTQKATLVCLATGFYPDHVELSWWVNGKEVHSGVSTDPQPLKEQPALNDSRYCLSSRLRVSATFWQNPRNHFRCQVQFYGLSENDEWTQDRAKPVTQIVSAEAWGRADCGFTSESYQQGVLSATILYEILLGKATLYAVLVSALVLMAMVKRKDSRG

SEQ ID NO: 975 - protein, 279 aa, Homo sapiens
MAMLLGASVLILWLQPDWVNSQQKNDDQQVKQNSPSLSVQEGRISILNCDYTNSMFDYFLWYKKYPAEGPTFLISISSIKDKNEDGRFTVFLNKSAKHLSLHIVPSQPGDSAVYFCAALPNFGNEKLTFGTGTRLTIIPNIQNPDPAVYQLRDSKSSDKSVCLFTDFDSQTNVSQSKDSDVYITDKTVLDMRSMDFKSNSAVAWSNKSDFACANAFNNSIIPEDTFFPSPESSCDVKLVEKSFETDTNLNFQNLSVIGFRILLLKVAGFNLLMTLRLWS

SEQ ID NO: 976 - protein, 312 aa, Homo sapiens
MGTSLLCWMALCLLGADHADTGVSQNPRHKITKRGQNVTFRCDPISEHNRLYWYRQTLGQGPEFLTYFQNEAQLEKSRLLSDRFSAERPKGSFSTLEIQRTEQGDSAMYLCASSKTGVSYEQYFGPGTRLTVTEDLKNVFPPEVAVFEPSEAEISHTQKATLVCLATGFYPDHVELSWWVNGKEVHSGVSTDPQPLKEQPALNDSRYCLSSRLRVSATFWQNPRNHFRCQVQFYGLSENDEWTQDRAKPVTQIVSAEAWGRADCGFTSESYQQGVLSATILYEILLGKATLYAVLVSALVLMAMVKRKDSRG

SEQ ID NO: 977 - protein, 275 aa, Homo sapiens
MESFLGGVLLILWLQVDWVKSQKIEQNSEALNIQEGKTATLTCNYTNYSPAYLQWYRQDPGRGPVFLLLIRENEKEKRKERLKVTFDTTLKQSLFHITASQPADSATYLCALDGFYGDSNYQLIWGAGTKLIIKPDIQNPDPAVYQLRDSKSSDKSVCLFTDFDSQTNVSQSKDSDVYITDKTVLDMRSMDFKSNSAVAWSNKSDFACANAFNNSIIPEDTFFPSPESSCDVKLVEKSFETDTNLNFQNLSVIGFRILLLKVAGFNLLMTLRLWS

SEQ ID NO: 978 - protein, 310 aa, Homo sapiens
MGTRLLFWVAFCLLGADHTGAGVSQSPSNKVTEKGKDVELRCDPISGHTALYWYRQSLGQGLEFLIYFQGNSAPDKSGLPSDRFSAERTGGSVSTLTIQRTQQEDSAVYLCASSPGRSGSPLHFGNGTRLTVTEDLNKVFPPEVAVFEPSEAEISHTQKATLVCLATGFFPDHVELSWWVNGKEVHSGVSTDPQPLKEQPALNDSRYCLSSRLRVSATFWQNPRNHFRCQVQFYGLSENDEWTQDRAKPVTQIVSAEAWGRADCGFTSVSYQQGVLSATILYEILLGKATLYAVLVSALVLMAMVKRKDF

SEQ ID NO: 979 - protein, 275 aa, Homo sapiens
MLTASLLRAVIASICVVSSMAQKVTQAQTEISVVEKEDVTLDCVYETRDTTYYLFWYKQPPSGELVFLIRRNSFDEQNEISGRYSWNFQKSTSSFNFTITASQVVDSAVYFCALSDLNNNARLMFGDGTQLVVKPNIQNPDPAVYQLRDSKSSDKSVCLFTDFDSQTNVSQSKDSDVYITDKTVLDMRSMDFKSNSAVAWSNKSDFACANAFNNSIIPEDTFFPSPESSCDVKLVEKSFETDTNLNFQNLSVIGFRILLLKVAGFNLLMTLRLWS

SEQ ID NO: 980 - protein, 311 aa, Homo sapiens
MGTSLLCWVVLGFLGTDHTGAGVSQSPRYKVTKRGQDVALRCDPISGHVSLYWYRQALGQGPEFLTYFNYEAQQDKSGLPNDRFSAERPEGSISTLTIQRTEQRDSAMYRCASSPGGQLNTEAFFGQGTRLTVVEDLNKVFPPEVAVFEPSEAEISHTQKATLVCLATGFFPDHVELSWWVNGKEVHSGVSTDPQPLKEQPALNDSRYCLSSRLRVSATFWQNPRNHFRCQVQFYGLSENDEWTQDRAKPVTQIVSAEAWGRADCGFTSVSYQQGVLSATILYEILLGKATLYAVLVSALVLMAMVKRKDF

SEQ ID NO: 981 - protein, 274 aa, Homo sapiens
MESFLGGVLLILWLQVDWVKSQKIEQNSEALNIQEGKTATLTCNYTNYSPAYLQWYRQDPGRGPVFLLLIRENEKEKRKERLKVTFDTTLKQSLFHITASQPADSATYLCALDPSGAGSYQLTFGKGTKLSVIPNIQNPDPAVYQLRDSKSSDKSVCLFTDFDSQTNVSQSKDSDVYITDKTVLDMRSMDFKSNSAVAWSNKSDFACANAFNNSIIPEDTFFPSPESSCDVKLVEKSFETDTNLNFQNLSVIGFRILLLKVAGFNLLMTLRLWS

SEQ ID NO: 982 - protein, 311 aa, Homo sapiens
MDTRVLCCAVICLLGAGLSNAGVMQNPRHLVRRRGQEARLRCSPMKGHSHVYWYRQLPEEGLKFMVYLQKENIIDESGMPKERFSAEFPKEGPSILRIQQVVRGDSAAYFCASSEDRIANQPQHFGDGTRLSILEDLNKVFPPEVAVFEPSEAEISHTQKATLVCLATGFFPDHVELSWWVNGKEVHSGVSTDPQPLKEQPALNDSRYCLSSRLRVSATFWQNPRNHFRCQVQFYGLSENDEWTQDRAKPVTQIVSAEAWGRADCGFTSVSYQQGVLSATILYEILLGKATLYAVLVSALVLMAMVKRKDF

SEQ ID NO: 983 - protein, 272 aa, Homo sapiens
MLLLLVPVLEVIFTLGGTRAQSVTQLGSHVSVSEGALVLLRCNYSSSVPPYLFWYVQYPNQGLQLLLKYTSAATLVKGINGFEAEFKKSETSFHLTKPSAHMSDAAEYFCAVSDTGRRALTFGSGTRLQVQPNIQNPDPAVYQLRDSKSSDKSVCLFTDFDSQTNVSQSKDSDVYITDKTVLDMRSMDFKSNSAVAWSNKSDFACANAFNNSIIPEDTFFPSPESSCDVKLVEKSFETDTNLNFQNLSVIGFRILLLKVAGFNLLMTLRLWS

SEQ ID NO: 984 - protein, 309 aa, Homo sapiens
MATRLLCCVVLCLLGEELIDARVTQTPRHKVTEMGQEVTMRCQPILGHNTVFWYRQTMMQGLELLAYFRNRAPLDDSGMPKDRFSAEMPDATLATLKIQPSEPRDSAVYFCASGFGEGNTIYFGEGSWLTVVEDLNKVFPPEVAVFEPSEAEISHTQKATLVCLATGFFPDHVELSWWVNGKEVHSGVSTDPQPLKEQPALNDSRYCLSSRLRVSATFWQNPRNHFRCQVQFYGLSENDEWTQDRAKPVTQIVSAEAWGRADCGFTSVSYQQGVLSATILYEILLGKATLYAVLVSALVLMAMVKRKDF

SEQ ID NO: 985 - protein, 273 aa, Homo sapiens
MAGIRALFMYLWLQLDWVSRGESVGLHLPTLSVQEGDNSIINCAYSNSASDYFIWYKQESGKGPQFIIDIRSNMDKRQGQRVTVLLNKTVKHLSLQIAATQPGDSAVYFCAENQSNSGYALNFGKGTSLLVTPHIQNPDPAVYQLRDSKSSDKSVCLFTDFDSQTNVSQSKDSDVYITDKTVLDMRSMDFKSNSAVAWSNKSDFACANAFNNSIIPEDTFFPSPESSCDVKLVEKSFETDTNLNFQNLSVIGFRILLLKVAGFNLLMTLRLWS

SEQ ID NO: 986 - protein, 310 aa, Homo sapiens
MGTRLLCWAALCLLGAELTEAGVAQSPRYKIIEKRQSVAFWCNPISGHATLYWYQQILGQGPKLLIQFQNNGVVDDSQLPKDRFSAERLKGVDSTLKIQPAKLEDSAVYLCASSWGTGNQPQHFGDGTRLSILEDLNKVFPPEVAVFEPSEAEISHTQKATLVCLATGFFPDHVELSWWVNGKEVHSGVSTDPQPLKEQPALNDSRYCLSSRLRVSATFWQNPRNHFRCQVQFYGLSENDEWTQDRAKPVTQIVSAEAWGRADCGFTSVSYQQGVLSATILYEILLGKATLYAVLVSALVLMAMVKRKDF

SEQ ID NO: 987 - protein, 269 aa, Homo sapiens
MNYSPGLVSLILLLLGRTRGNSVTQMEGPVTLSEEAFLTINCTYTATGYPSLFWYVQYPGEGLQLLLKATKADDKGSNKGFEATYRKETTSFHLEKGSVQVSDSAVYFCAQTSYDKVIFGPGTSLSVIPNIQNPDPAVYQLRDSKSSDKSVCLFTDFDSQTNVSQSKDSDVYITDKTVLDMRSMDFKSNSAVAWSNKSDFACANAFNNSIIPEDTFFPSPESSCDVKLVEKSFETDTNLNFQNLSVIGFRILLLKVAGFNLLMTLRLWS

SEQ ID NO: 988 - protein, 317 aa, Homo sapiens
MGCRLLCCAVLCLLGAGELVPMETGVTQTPRHLVMGMTNKKSLKCEQHLGHNAMYWYKQSAKKPLELMFVYSLEERVENNSVPSRFSPECPNSSHLFLHLHTLQPEDSALYLCASSQNLASGTYDTQYFGPGTRLTVLEDLKNVFPPEVAVFEPSEAEISHTQKATLVCLATGFYPDHVELSWWVNGKEVHSGVSTDPQPLKEQPALNDSRYCLSSRLRVSATFWQNPRNHFRCQVQFYGLSENDEWTQDRAKPVTQIVSAEAWGRADCGFTSESYQQGVLSATILYEILLGKATLYAVLVSALVLMAMVKRKDSRG

SEQ ID NO: 989 - protein, 279 aa, Homo sapiens
MAMLLGASVLILWLQPDWVNSQQKNDDQQVKQNSPSLSVQEGRISILNCDYTNSMFDYFLWYKKYPAEGPTFLISISSIKDKNEDGRFTVFLNKSAKHLSLHIVPSQPGDSAVYFCAASPMNRDDKIIFGKGTRLHILPNIQNPDPAVYQLRDSKSSDKSVCLFTDFDSQTNVSQSKDSDVYITDKTVLDMRSMDFKSNSAVAWSNKSDFACANAFNNSIIPEDTFFPSPESSCDVKLVEKSFETDTNLNFQNLSVIGFRILLLKVAGFNLLMTLRLWS

SEQ ID NO: 990 - protein, 313 aa, Homo sapiens
MGTRLLCWVVLGFLGTDHTGAGVSQSPRYKVAKRGQDVALRCDPISGHVSLFWYQQALGQGPEFLTYFQNEAQLDKSGLPSDRFFAERPEGSVSTLKIQRTQQEDSAVYLCASSRGRNVYNEQFFGPGTRLTVLEDLKNVFPPEVAVFEPSEAEISHTQKATLVCLATGFYPDHVELSWWVNGKEVHSGVSTDPQPLKEQPALNDSRYCLSSRLRVSATFWQNPRNHFRCQVQFYGLSENDEWTQDRAKPVTQIVSAEAWGRADCGFTSESYQQGVLSATILYEILLGKATLYAVLVSALVLMAMVKRKDSRG

SEQ ID NO: 991 - protein, 279 aa, Homo sapiens
MAMLLGASVLILWLQPDWVNSQQKNDDQQVKQNSPSLSVQEGRISILNCDYTNSMFDYFLWYKKYPAEGPTFLISISSIKDKNEDGRFTVFLNKSAKHLSLHIVPSQPGDSAVYFCAVLPMNRDDKIIFGKGTRLHILPNIQNPDPAVYQLRDSKSSDKSVCLFTDFDSQTNVSQSKDSDVYITDKTVLDMRSMDFKSNSAVAWSNKSDFACANAFNNSIIPEDTFFPSPESSCDVKLVEKSFETDTNLNFQNLSVIGFRILLLKVAGFNLLMTLRLWS

SEQ ID NO: 992 - protein, 313 aa, Homo sapiens
MGPGLLHWMALCLLGTGHGDAMVIQNPRYQVTQFGKPVTLSCSQTLNHNVMYWYQQKSSQAPKLLFHYYDKDFNNEADTPDNFQSRRPNTSFCFLDIRSPGLGDTAMYLCATSTYGQGATGELFFGEGSRLTVLEDLKNVFPPEVAVFEPSEAEISHTQKATLVCLATGFYPDHVELSWWVNGKEVHSGVSTDPQPLKEQPALNDSRYCLSSRLRVSATFWQNPRNHFRCQVQFYGLSENDEWTQDRAKPVTQIVSAEAWGRADCGFTSESYQQGVLSATILYEILLGKATLYAVLVSALVLMAMVKRKDSRG

SEQ ID NO: 993 - protein, 272 aa, Homo sapiens
MKTFAGFSFLFLWLQLDCMSRGEDVEQSLFLSVREGDSSVINCTYTDSSSTYLYWYKQEPGAGLQLLTYIFSNMDMKQDQRLTVLLNKKDKHLSLRIADTQTGDSAIYFCAESAGGYQKVTFGIGTKLQVIPNIQNPDPAVYQLRDSKSSDKSVCLFTDFDSQTNVSQSKDSDVYITDKTVLDMRSMDFKSNSAVAWSNKSDFACANAFNNSIIPEDTFFPSPESSCDVKLVEKSFETDTNLNFQNLSVIGFRILLLKVAGFNLLMTLRLWS

SEQ ID NO: 994 - protein, 309 aa, Homo sapiens
MATRLLCCVVLCLLGEELIDARVTQTPRHKVTEMGQEVTMRCQPILGHNTVFWYRQTMMQGLELLAYFRNRAPLDDSGMPKDRFSAEMPDATLATLKIQPSEPRDSAVYFCASGFGAGNTIYFGEGSWLTVVEDLNKVFPPEVAVFEPSEAEISHTQKATLVCLATGFFPDHVELSWWVNGKEVHSGVSTDPQPLKEQPALNDSRYCLSSRLRVSATFWQNPRNHFRCQVQFYGLSENDEWTQDRAKPVTQIVSAEAWGRADCGFTSVSYQQGVLSATILYEILLGKATLYAVLVSALVLMAMVKRKDF

SEQ ID NO: 995 - protein, 279 aa, Homo sapiens
MAMLLGASVLILWLQPDWVNSQQKNDDQQVKQNSPSLSVQEGRISILNCDYTNSMFDYFLWYKKYPAEGPTFLISISSIKDKNEDGRFTVFLNKSAKHLSLHIVPSQPGDSAVYFCASVANFGNEKLTFGTGTRLTIIPNIQNPDPAVYQLRDSKSSDKSVCLFTDFDSQTNVSQSKDSDVYITDKTVLDMRSMDFKSNSAVAWSNKSDFACANAFNNSIIPEDTFFPSPESSCDVKLVEKSFETDTNLNFQNLSVIGFRILLLKVAGFNLLMTLRLWS

SEQ ID NO: 996 - protein, 312 aa, Homo sapiens
MGTSLLCWMALCLLGADHADTGVSQNPRHKITKRGQNVTFRCDPISEHNRLYWYRQTLGQGPEFLTYFQNEAQLEKSRLLSDRFSAERPKGSFSTLEIQRTEQGDSAMYLCASSRTGPTFEQYFGPGTRLTVTEDLKNVFPPEVAVFEPSEAEISHTQKATLVCLATGFYPDHVELSWWVNGKEVHSGVSTDPQPLKEQPALNDSRYCLSSRLRVSATFWQNPRNHFRCQVQFYGLSENDEWTQDRAKPVTQIVSAEAWGRADCGFTSESYQQGVLSATILYEILLGKATLYAVLVSALVLMAMVKRKDSRG

SEQ ID NO: 997 - protein, 271 aa, Homo sapiens
MLLLLVPVLEVIFTLGGTRAQSVTQLDSHVSVSEGTPVLLRCNYSSSYSPSLFWYVQHPNKGLQLLLKYTSAATLVKGINGFEAEFKKSETSFHLTKPSAHMSDAAEYFCVVSELDDKIIFGKGTRLHILPNIQNPDPAVYQLRDSKSSDKSVCLFTDFDSQTNVSQSKDSDVYITDKTVLDMRSMDFKSNSAVAWSNKSDFACANAFNNSIIPEDTFFPSPESSCDVKLVEKSFETDTNLNFQNLSVIGFRILLLKVAGFNLLMTLRLWS

SEQ ID NO: 998 - protein, 315 aa, Homo sapiens
MGTSLLCWVVLGFLGTDHTGAGVSQSPRYKVTKRGQDVALRCDPISGHVSLYWYRQALGQGPEFLTYFNYEAQQDKSGLPNDRFSAERPEGSISTLTIQRTEQRDSAMYRCASSTSIAGGTYNEQFFGPGTRLTVLEDLKNVFPPEVAVFEPSEAEISHTQKATLVCLATGFYPDHVELSWWVNGKEVHSGVSTDPQPLKEQPALNDSRYCLSSRLRVSATFWQNPRNHFRCQVQFYGLSENDEWTQDRAKPVTQIVSAEAWGRADCGFTSESYQQGVLSATILYEILLGKATLYAVLVSALVLMAMVKRKDSRG

SEQ ID NO: 999 - protein, 271 aa, Homo sapiens
MLLLLVPVLEVIFTLGGTRAQSVTQLDSHVSVSEGTPVLLRCNYSSSYSPSLFWYVQHPNKGLQLLLKYTSAATLVKGINGFEAEFKKSETSFHLTKPSAHMSDAAEYFCVVSEIDDKIIFGKGTRLHILPNIQNPDPAVYQLRDSKSSDKSVCLFTDFDSQTNVSQSKDSDVYITDKTVLDMRSMDFKSNSAVAWSNKSDFACANAFNNSIIPEDTFFPSPESSCDVKLVEKSFETDTNLNFQNLSVIGFRILLLKVAGFNLLMTLRLWS

SEQ ID NO: 1000 - protein, 313 aa, Homo sapiens
MGTRLFFYVALCLLWTGHMDAGITQSPRHKVTETGTPVTLRCHQTENHRYMYWYRQDPGHGLRLIHYSYGVKDTDKGEVSDGYSVSRSKTEDFLLTLESATSSQTSVYFCAITKTSGALYNEQFFGPGTRLTVLEDLKNVFPPEVAVFEPSEAEISHTQKATLVCLATGFYPDHVELSWWVNGKEVHSGVSTDPQPLKEQPALNDSRYCLSSRLRVSATFWQNPRNHFRCQVQFYGLSENDEWTQDRAKPVTQIVSAEAWGRADCGFTSESYQQGVLSATILYEILLGKATLYAVLVSALVLMAMVKRKDSRG

SEQ ID NO: 1001 - protein, 276 aa, Homo sapiens
MLTASLLRAVIASICVVSSMAQKVTQAQTEISVVEKEDVTLDCVYETRDTTYYLFWYKQPPSGELVFLIRRNSFDEQNEISGRYSWNFQKSTSSFNFTITASQVVDSAVYFCALRSGDNAGNMLTFGGGTRLMVKPHIQNPDPAVYQLRDSKSSDKSVCLFTDFDSQTNVSQSKDSDVYITDKTVLDMRSMDFKSNSAVAWSNKSDFACANAFNNSIIPEDTFFPSPESSCDVKLVEKSFETDTNLNFQNLSVIGFRILLLKVAGFNLLMTLRLWS

SEQ ID NO: 1002 - protein, 313 aa, Homo sapiens
MGIRLLCRVAFCFLAVGLVDVKVTQSSRYLVKRTGEKVFLECVQDMDHENMFWYRQDPGLGLRLIYFSYDVKMKEKGDIPEGYSVSREKKERFSLILESASTNQTSMYLCASSLPWTGQTNVLTFGAGSRLTVLEDLKNVFPPEVAVFEPSEAEISHTQKATLVCLATGFYPDHVELSWWVNGKEVHSGVSTDPQPLKEQPALNDSRYCLSSRLRVSATFWQNPRNHFRCQVQFYGLSENDEWTQDRAKPVTQIVSAEAWGRADCGFTSESYQQGVLSATILYEILLGKATLYAVLVSALVLMAMVKRKDSRG

SEQ ID NO: 1003 - protein, 275 aa, Homo sapiens
MAMLLGASVLILWLQPDWVNSQQKNDDQQVKQNSPSLSVQEGRISILNCDYTNSMFDYFLWYKKYPAEGPTFLISISSIKDKNEDGRFTVFLNKSAKHLSLHIVPSQPGDSAVYFCAASEDKIIFGKGTRLHILPNIQNPDPAVYQLRDSKSSDKSVCLFTDFDSQTNVSQSKDSDVYITDKTVLDMRSMDFKSNSAVAWSNKSDFACANAFNNSIIPEDTFFPSPESSCDVKLVEKSFETDTNLNFQNLSVIGFRILLLKVAGFNLLMTLRLWS

SEQ ID NO: 1004 - protein, 311 aa, Homo sapiens
MDSWTFCCVSLCILVAKHTDAGVIQSPRHEVTEMGQEVTLRCKPISGHNSLFWYRQTMMRGLELLIYFNNNVPIDDSGMPEDRFSAKMPNASFSTLKIQPSEPRDSAVYFCASSSRPVNEQFFGPGTRLTVLEDLKNVFPPEVAVFEPSEAEISHTQKATLVCLATGFYPDHVELSWWVNGKEVHSGVSTDPQPLKEQPALNDSRYCLSSRLRVSATFWQNPRNHFRCQVQFYGLSENDEWTQDRAKPVTQIVSAEAWGRADCGFTSESYQQGVLSATILYEILLGKATLYAVLVSALVLMAMVKRKDSRG

SEQ ID NO: 1005 - protein, 9 aa, Severe acute respiratory syndrome coronavirus 2
VTDTPKGPK

SEQ ID NO: 1006 - protein, 278 aa, Homo sapiens
MEKNPLAAPLLILWFHLDCVSSILNVEQSPQSLHVQEGDSTNFTCSFPSSNFYALHWYRWETAKSPEALFVMTLNGDEKKKGRISATLNTKEGYSYLYIKGSQPEDSATYLCAFMGHMIKAAGNKLTFGGGTRVLVKPNIQNPDPAVYQLRDSKSSDKSVCLFTDFDSQTNVSQSKDSDVYITDKTVLDMRSMDFKSNSAVAWSNKSDFACANAFNNSIIPEDTFFPSPESSCDVKLVEKSFETDTNLNFQNLSVIGFRILLLKVAGFNLLMTLRLWS

SEQ ID NO: 1007 - protein, 310 aa, Homo sapiens
MGPQLLGYVVLCLLGAGPLEAQVTQNPRYLITVTGKKLTVTCSQNMNHEYMSWYRQDPGLGLRQIYYSMNVEVTDKGDVPEGYKVSRKEKRNFPLILESPSPNQTSLYFCASSLAYGYEQYFGPGTRLTVTEDLKNVFPPEVAVFEPSEAEISHTQKATLVCLATGFYPDHVELSWWVNGKEVHSGVSTDPQPLKEQPALNDSRYCLSSRLRVSATFWQNPRNHFRCQVQFYGLSENDEWTQDRAKPVTQIVSAEAWGRADCGFTSESYQQGVLSATILYEILLGKATLYAVLVSALVLMAMVKRKDSRG

SEQ ID NO: 1008 - protein, 277 aa, Homo sapiens
MAMLLGASVLILWLQPDWVNSQQKNDDQQVKQNSPSLSVQEGRISILNCDYTNSMFDYFLWYKKYPAEGPTFLISISSIKDKNEDGRFTVFLNKSAKHLSLHIVPSQPGDSAVYFCAASGAGNQFYFGTGTSLTVIPNIQNPDPAVYQLRDSKSSDKSVCLFTDFDSQTNVSQSKDSDVYITDKTVLDMRSMDFKSNSAVAWSNKSDFACANAFNNSIIPEDTFFPSPESSCDVKLVEKSFETDTNLNFQNLSVIGFRILLLKVAGFNLLMTLRLWS

SEQ ID NO: 1009 - protein, 312 aa, Homo sapiens
MGIRLLCRVAFCFLAVGLVDVKVTQSSRYLVKRTGEKVFLECVQDMDHENMFWYRQDPGLGLRLIYFSYDVKMKEKGDIPEGYSVSREKKERFSLILESASTNQTSMYLCASSLLYGSQWGTEAFFGQGTRLTVVEDLNKVFPPEVAVFEPSEAEISHTQKATLVCLATGFFPDHVELSWWVNGKEVHSGVSTDPQPLKEQPALNDSRYCLSSRLRVSATFWQNPRNHFRCQVQFYGLSENDEWTQDRAKPVTQIVSAEAWGRADCGFTSVSYQQGVLSATILYEILLGKATLYAVLVSALVLMAMVKRKDF

SEQ ID NO: 1010 - protein, 277 aa, Homo sapiens
MAMLLGASVLILWLQPDWVNSQQKNDDQQVKQNSPSLSVQEGRISILNCDYTNSMFDYFLWYKKYPAEGPTFLISISSIKDKNEDGRFTVFLNKSAKHLSLHIVPSQPGDSAVYFCAASGERQKLLFARGTMLKVDLNIQNPDPAVYQLRDSKSSDKSVCLFTDFDSQTNVSQSKDSDVYITDKTVLDMRSMDFKSNSAVAWSNKSDFACANAFNNSIIPEDTFFPSPESSCDVKLVEKSFETDTNLNFQNLSVIGFRILLLKVAGFNLLMTLRLWS

SEQ ID NO: 1011 - protein, 309 aa, Homo sapiens
MGTSLLCWVVLGFLGTDHTGAGVSQSPRYKVTKRGQDVALRCDPISGHVSLYWYRQALGQGPEFLTYFNYEAQQDKSGLPNDRFSAERPEGSISTLTIQRTEQRDSAMYRCASSPGTPLKLFFGSGTQLSVLEDLNKVFPPEVAVFEPSEAEISHTQKATLVCLATGFFPDHVELSWWVNGKEVHSGVSTDPQPLKEQPALNDSRYCLSSRLRVSATFWQNPRNHFRCQVQFYGLSENDEWTQDRAKPVTQIVSAEAWGRADCGFTSVSYQQGVLSATILYEILLGKATLYAVLVSALVLMAMVKRKDF

SEQ ID NO: 1012 - protein, 10 aa, Severe acute respiratory syndrome coronavirus 2
ATEGALNTPK

SEQ ID NO: 1013 - protein, 271 aa, Homo sapiens
MASAPISMLAMLFTLSGLRAQSVAQPEDQVNVAEGNPLTVKCTYSVSGNPYLFWYVQYPNRGLQFLLKYITGDNLVKGSYGFEAEFNKSQTSFHLKKPSALVSDSALYFCPRGDAGNMLTFGGGTRLMVKPHIQNPDPAVYQLRDSKSSDKSVCLFTDFDSQTNVSQSKDSDVYITDKTVLDMRSMDFKSNSAVAWSNKSDFACANAFNNSIIPEDTFFPSPESSCDVKLVEKSFETDTNLNFQNLSVIGFRILLLKVAGFNLLMTLRLWS

SEQ ID NO: 1014 - protein, 310 aa, Homo sapiens
MGTSLLCWMALCLLGADHADTGVSQNPRHKITKRGQNVTFRCDPISEHNRLYWYRQTLGQGPEFLTYFQNEAQLEKSRLLSDRFSAERPKGSFSTLEIQRTEQGDSAMYLCASSLKIWELFFGEGSRLTVLEDLKNVFPPEVAVFEPSEAEISHTQKATLVCLATGFYPDHVELSWWVNGKEVHSGVSTDPQPLKEQPALNDSRYCLSSRLRVSATFWQNPRNHFRCQVQFYGLSENDEWTQDRAKPVTQIVSAEAWGRADCGFTSESYQQGVLSATILYEILLGKATLYAVLVSALVLMAMVKRKDSRG

SEQ ID NO: 1015 - protein, 268 aa, Homo sapiens
MRLVARVTVFLTFGTIIDAKTTQPPSMDCAEGRAANLPCNHSTISGNEYVYWYRQIHSQGPQYIIHGLKNNETNEMASLIITEDRKSSTLILPHATLRDTAVYYCIFLGGGSQGNLIFGKGTKLSVKPNIQNPDPAVYQLRDSKSSDKSVCLFTDFDSQTNVSQSKDSDVYITDKTVLDMRSMDFKSNSAVAWSNKSDFACANAFNNSIIPEDTFFPSPESSCDVKLVEKSFETDTNLNFQNLSVIGFRILLLKVAGFNLLMTLRLWS

SEQ ID NO: 1016 - protein, 271 aa, Homo sapiens
MVLKFSVSILWIQLAWVSTQLLEQSPQFLSIQEGENLTVYCNSSSVFSSLQWYRQEPGEGPVLLVTVVTGGEVKKLKRLTFQFGDARKDSSLHITAAQPGDTGLYLCAGFRSGGGADGLTFGKGTHLIIQPYIQNPDPAVYQLRDSKSSDKSVCLFTDFDSQTNVSQSKDSDVYITDKTVLDMRSMDFKSNSAVAWSNKSDFACANAFNNSIIPEDTFFPSPESSCDVKLVEKSFETDTNLNFQNLSVIGFRILLLKVAGFNLLMTLRLWS

SEQ ID NO: 1017 - protein, 311 aa, Homo sapiens
MGFRLLCCVAFCLLGAGPVDSGVTQTPKHLITATGQRVTLRCSPRSGDLSVYWYQQSLDQGLQFLIQYYNGEERAKGNILERFSAQQFPDLHSELNLSSLELGDSALYFCASSPAGGYYEQYFGPGTRLTVTEDLKNVFPPEVAVFEPSEAEISHTQKATLVCLATGFYPDHVELSWWVNGKEVHSGVSTDPQPLKEQPALNDSRYCLSSRLRVSATFWQNPRNHFRCQVQFYGLSENDEWTQDRAKPVTQIVSAEAWGRADCGFTSESYQQGVLSATILYEILLGKATLYAVLVSALVLMAMVKRKDSRG

SEQ ID NO: 1018 - protein, 270 aa, Homo sapiens
MNYSPGLVSLILLLLGRTRGNSVTQMEGPVTLSEEAFLTINCTYTATGYPSLFWYVQYPGEGLQLLLKATKADDKGSNKGFEATYRKETTSFHLEKGSVQVSDSAVYFCALSRSGNQFYFGTGTSLTVIPNIQNPDPAVYQLRDSKSSDKSVCLFTDFDSQTNVSQSKDSDVYITDKTVLDMRSMDFKSNSAVAWSNKSDFACANAFNNSIIPEDTFFPSPESSCDVKLVEKSFETDTNLNFQNLSVIGFRILLLKVAGFNLLMTLRLWS

SEQ ID NO: 1019 - protein, 310 aa, Homo sapiens
MGTRLLCWAALCLLGAELTEAGVAQSPRYKIIEKRQSVAFWCNPISGHATLYWYQQILGQGPKLLIQFQNNGVVDDSQLPKDRFSAERLKGVDSTLKIQPAKLEDSAVYLCASRGGPDYEKLFFGSGTQLSVLEDLNKVFPPEVAVFEPSEAEISHTQKATLVCLATGFFPDHVELSWWVNGKEVHSGVSTDPQPLKEQPALNDSRYCLSSRLRVSATFWQNPRNHFRCQVQFYGLSENDEWTQDRAKPVTQIVSAEAWGRADCGFTSVSYQQGVLSATILYEILLGKATLYAVLVSALVLMAMVKRKDF

SEQ ID NO: 1020 - protein, 9 aa, Severe acute respiratory syndrome coronavirus 2
QYIKWPWYI

SEQ ID NO: 1021 - protein, 272 aa, Homo sapiens
MISLRVLLVILWLQLSWVWSQRKEVEQDPGPFNVPEGATVAFNCTYSNSASQSFFWYRQDCRKEPKLLMSVYSSGNEDGRFTAQLNRASQYISLLIRDSKLSDSATYLCVVTPFSDGQKLLFARGTMLKVDLNIQNPDPAVYQLRDSKSSDKSVCLFTDFDSQTNVSQSKDSDVYITDKTVLDMRSMDFKSNSAVAWSNKSDFACANAFNNSIIPEDTFFPSPESSCDVKLVEKSFETDTNLNFQNLSVIGFRILLLKVAGFNLLMTLRLWS

SEQ ID NO: 1022 - protein, 321 aa, Homo sapiens
MLLLLLLLGPGISLLLPGSLAGSGLGAVVSQHPSWVICKSGTSVKIECRSLDFQATTMFWYRQFPKQSLMLMATSNEGSKATYEQGVEKDKFLINHASLTLSTLTVTSAHPEDSSFYICSARDRTSSNVEQYFGPGTRLTVTEDLKNVFPPEVAVFEPSEAEISHTQKATLVCLATGFYPDHVELSWWVNGKEVHSGVSTDPQPLKEQPALNDSRYCLSSRLRVSATFWQNPRNHFRCQVQFYGLSENDEWTQDRAKPVTQIVSAEAWGRADCGFTSESYQQGVLSATILYEILLGKATLYAVLVSALVLMAMVKRKDSRG

SEQ ID NO: 1023 - protein, 269 aa, Homo sapiens
METLLGLLILWLQLQWVSSKQEVTQIPAALSVPEGENLVLNCSFTDSAIYNLQWFRQDPGKGLTSLLLIQSSQREQTSGRLNASLDKSSGRSTLYIAASQPGDSATYLCAVKKYSTLTFGKGTMLLVSPDIQNPDPAVYQLRDSKSSDKSVCLFTDFDSQTNVSQSKDSDVYITDKTVLDMRSMDFKSNSAVAWSNKSDFACANAFNNSIIPEDTFFPSPESSCDVKLVEKSFETDTNLNFQNLSVIGFRILLLKVAGFNLLMTLRLWS

SEQ ID NO: 1024 - protein, 317 aa, Homo sapiens
MGCRLLCCAVLCLLGAGELVPMETGVTQTPRHLVMGMTNKKSLKCEQHLGHNAMYWYKQSAKKPLELMFVYSLEERVENNSVPSRFSPECPNSSHLFLHLHTLQPEDSALYLCASSQDRSLAGEDTQYFGPGTRLTVLEDLKNVFPPEVAVFEPSEAEISHTQKATLVCLATGFYPDHVELSWWVNGKEVHSGVSTDPQPLKEQPALNDSRYCLSSRLRVSATFWQNPRNHFRCQVQFYGLSENDEWTQDRAKPVTQIVSAEAWGRADCGFTSESYQQGVLSATILYEILLGKATLYAVLVSALVLMAMVKRKDSRG

SEQ ID NO: 1025 - protein, 271 aa, Homo sapiens
METLLGLLILWLQLQWVSSKQEVTQIPAALSVPEGENLVLNCSFTDSAIYNLQWFRQDPGKGLTSLLLIQSSQREQTSGRLNASLDKSSGRSTLYIAASQPGDSATYLCAAPQYNNNDMRFGAGTRLTVKPNIQNPDPAVYQLRDSKSSDKSVCLFTDFDSQTNVSQSKDSDVYITDKTVLDMRSMDFKSNSAVAWSNKSDFACANAFNNSIIPEDTFFPSPESSCDVKLVEKSFETDTNLNFQNLSVIGFRILLLKVAGFNLLMTLRLWS

SEQ ID NO: 1026 - protein, 310 aa, Homo sapiens
MDTWLVCWAIFSLLKAGLTEPEVTQTPSHQVTQMGQEVILRCVPISNHLYFYWYRQILGQKVEFLVSFYNNEISEKSEIFDDQFSVERPDGSNFTLKIRSTKLEDSAMYFCASSEGSENTEAFFGQGTRLTVVEDLNKVFPPEVAVFEPSEAEISHTQKATLVCLATGFFPDHVELSWWVNGKEVHSGVSTDPQPLKEQPALNDSRYCLSSRLRVSATFWQNPRNHFRCQVQFYGLSENDEWTQDRAKPVTQIVSAEAWGRADCGFTSVSYQQGVLSATILYEILLGKATLYAVLVSALVLMAMVKRKDF

SEQ ID NO: 1027 - protein, 272 aa, Homo sapiens
MISLRVLLVILWLQLSWVWSQRKEVEQDPGPFNVPEGATVAFNCTYSNSASQSFFWYRQDCRKEPKLLMSVYSSGNEDGRFTAQLNRASQYISLLIRDSKLSDSATYLCVAQVGPDGQKLLFARGTMLKVDLNIQNPDPAVYQLRDSKSSDKSVCLFTDFDSQTNVSQSKDSDVYITDKTVLDMRSMDFKSNSAVAWSNKSDFACANAFNNSIIPEDTFFPSPESSCDVKLVEKSFETDTNLNFQNLSVIGFRILLLKVAGFNLLMTLRLWS

SEQ ID NO: 1028 - protein, 321 aa, Homo sapiens
MLLLLLLLGPGISLLLPGSLAGSGLGAVVSQHPSWVICKSGTSVKIECRSLDFQATTMFWYRQFPKQSLMLMATSNEGSKATYEQGVEKDKFLINHASLTLSTLTVTSAHPEDSSFYICSARDRGGSGVEQFFGPGTRLTVLEDLKNVFPPEVAVFEPSEAEISHTQKATLVCLATGFYPDHVELSWWVNGKEVHSGVSTDPQPLKEQPALNDSRYCLSSRLRVSATFWQNPRNHFRCQVQFYGLSENDEWTQDRAKPVTQIVSAEAWGRADCGFTSESYQQGVLSATILYEILLGKATLYAVLVSALVLMAMVKRKDSRG

SEQ ID NO: 1029 - protein, 272 aa, Homo sapiens
MTSIRAVFIFLWLQLDLVNGENVEQHPSTLSVQEGDSAVIKCTYSDSASNYFPWYKQELGKGPQLIIDIRSNVGEKKDQRIAVTLNKTAKHFSLHITETQPEDSAVYFCAAFSYNQGGKLIFGQGTELSVKPNIQNPDPAVYQLRDSKSSDKSVCLFTDFDSQTNVSQSKDSDVYITDKTVLDMRSMDFKSNSAVAWSNKSDFACANAFNNSIIPEDTFFPSPESSCDVKLVEKSFETDTNLNFQNLSVIGFRILLLKVAGFNLLMTLRLWS

SEQ ID NO: 1030 - protein, 320 aa, Homo sapiens
MLLLLLLLGPGISLLLPGSLAGSGLGAVVSQHPSWVICKSGTSVKIECRSLDFQATTMFWYRQFPKQSLMLMATSNEGSKATYEQGVEKDKFLINHASLTLSTLTVTSAHPEDSSFYICSAPGGQARDTQYFGPGTRLTVLEDLKNVFPPEVAVFEPSEAEISHTQKATLVCLATGFYPDHVELSWWVNGKEVHSGVSTDPQPLKEQPALNDSRYCLSSRLRVSATFWQNPRNHFRCQVQFYGLSENDEWTQDRAKPVTQIVSAEAWGRADCGFTSESYQQGVLSATILYEILLGKATLYAVLVSALVLMAMVKRKDSRG

SEQ ID NO: 1031 - protein, 275 aa, Homo sapiens
MLLLLVPVLEVIFTLGGTRAQSVTQLDSHVSVSEGTPVLLRCNYSSSYSPSLFWYVQHPNKGLQLLLKYTSAATLVKGINGFEAEFKKSETSFHLTKPSAHMSDAAEYFCVVSDPGTGGFKTIFGAGTRLFVKANIIQNPDPAVYQLRDSKSSDKSVCLFTDFDSQTNVSQSKDSDVYITDKTVLDMRSMDFKSNSAVAWSNKSDFACANAFNNSIIPEDTFFPSPESSCDVKLVEKSFETDTNLNFQNLSVIGFRILLLKVAGFNLLMTLRLWS

SEQ ID NO: 1032 - protein, 311 aa, Homo sapiens
MGPGLLCWALLCLLGAGLVDAGVTQSPTHLIKTRGQQVTLRCSPKSGHDTVSWYQQALGQGPQFIFQYYEEEERQRGNFPDRFSGHQFPNYSSELNVNALLLGDSALYLCASSSGGGQIYYGYTFGSGTRLTVVEDLNKVFPPEVAVFEPSEAEISHTQKATLVCLATGFFPDHVELSWWVNGKEVHSGVSTDPQPLKEQPALNDSRYCLSSRLRVSATFWQNPRNHFRCQVQFYGLSENDEWTQDRAKPVTQIVSAEAWGRADCGFTSVSYQQGVLSATILYEILLGKATLYAVLVSALVLMAMVKRKDF

SEQ ID NO: 1033 - protein, 272 aa, Homo sapiens
MISLRVLLVILWLQLSWVWSQRKEVEQDPGPFNVPEGATVAFNCTYSNSASQSFFWYRQDCRKEPKLLMSVYSSGNEDGRFTAQLNRASQYISLLIRDSKLSDSATYLCVVNPTGTASKLTFGTGTRLQVTLDIQNPDPAVYQLRDSKSSDKSVCLFTDFDSQTNVSQSKDSDVYITDKTVLDMRSMDFKSNSAVAWSNKSDFACANAFNNSIIPEDTFFPSPESSCDVKLVEKSFETDTNLNFQNLSVIGFRILLLKVAGFNLLMTLRLWS

SEQ ID NO: 1034 - protein, 311 aa, Homo sapiens
MGFRLLCCVAFCLLGAGPVDSGVTQTPKHLITATGQRVTLRCSPRSGDLSVYWYQQSLDQGLQFLIQYYNGEERAKGNILERFSAQQFPDLHSELNLSSLELGDSALYFCASSVAGGLYEQFFGPGTRLTVLEDLKNVFPPEVAVFEPSEAEISHTQKATLVCLATGFYPDHVELSWWVNGKEVHSGVSTDPQPLKEQPALNDSRYCLSSRLRVSATFWQNPRNHFRCQVQFYGLSENDEWTQDRAKPVTQIVSAEAWGRADCGFTSESYQQGVLSATILYEILLGKATLYAVLVSALVLMAMVKRKDSRG

SEQ ID NO: 1035 - protein, 277 aa, Homo sapiens
MLTASLLRAVIASICVVSSMAQKVTQAQTEISVVEKEDVTLDCVYETRDTTYYLFWYKQPPSGELVFLIRRNSFDEQNEISGRYSWNFQKSTSSFNFTITASQVVDSAVYFCALSEQPHNQGGKLIFGQGTELSVKPNIQNPDPAVYQLRDSKSSDKSVCLFTDFDSQTNVSQSKDSDVYITDKTVLDMRSMDFKSNSAVAWSNKSDFACANAFNNSIIPEDTFFPSPESSCDVKLVEKSFETDTNLNFQNLSVIGFRILLLKVAGFNLLMTLRLWS

SEQ ID NO: 1036 - protein, 315 aa, Homo sapiens
MVSRLLSLVSLCLLGAKHIEAGVTQFPSHSVIEKGQTVTLRCDPISGHDNLYWYRRVMGKEIKFLLHFVKESKQDESGMPNNRFLAERTGGTYSTLKVQPAELEDSGVYFCASSQVFGLAGRVEQFFGPGTRLTVLEDLKNVFPPEVAVFEPSEAEISHTQKATLVCLATGFYPDHVELSWWVNGKEVHSGVSTDPQPLKEQPALNDSRYCLSSRLRVSATFWQNPRNHFRCQVQFYGLSENDEWTQDRAKPVTQIVSAEAWGRADCGFTSESYQQGVLSATILYEILLGKATLYAVLVSALVLMAMVKRKDSRG

SEQ ID NO: 1037 - protein, 274 aa, Homo sapiens
MLLLLVPAFQVIFTLGGTRAQSVTQLDSQVPVFEEAPVELRCNYSSSVSVYLFWYVQYPNQGLQLLLKYLSGSTLVESINGFEAEFNKSQTSFHLRKPSVHISDTAEYFCAVSPPSGGYNKLIFGAGTRLAVHPYIQNPDPAVYQLRDSKSSDKSVCLFTDFDSQTNVSQSKDSDVYITDKTVLDMRSMDFKSNSAVAWSNKSDFACANAFNNSIIPEDTFFPSPESSCDVKLVEKSFETDTNLNFQNLSVIGFRILLLKVAGFNLLMTLRLWS

SEQ ID NO: 1038 - protein, 320 aa, Homo sapiens
MLLLLLLLGPGISLLLPGSLAGSGLGAVVSQHPSWVICKSGTSVKIECRSLDFQATTMFWYRQFPKQSLMLMATSNEGSKATYEQGVEKDKFLINHASLTLSTLTVTSAHPEDSSFYICSARDRDRAYEQYFGPGTRLTVTEDLKNVFPPEVAVFEPSEAEISHTQKATLVCLATGFYPDHVELSWWVNGKEVHSGVSTDPQPLKEQPALNDSRYCLSSRLRVSATFWQNPRNHFRCQVQFYGLSENDEWTQDRAKPVTQIVSAEAWGRADCGFTSESYQQGVLSATILYEILLGKATLYAVLVSALVLMAMVKRKDSRG

SEQ ID NO: 1039 - protein, 271 aa, Homo sapiens
METLLGLLILWLQLQWVSSKQEVTQIPAALSVPEGENLVLNCSFTDSAIYNLQWFRQDPGKGLTSLLLIQSSQREQTSGRLNASLDKSSGRSTLYIAASQPGDSATYLCAVPWYNNNDMRFGAGTRLTVKPNIQNPDPAVYQLRDSKSSDKSVCLFTDFDSQTNVSQSKDSDVYITDKTVLDMRSMDFKSNSAVAWSNKSDFACANAFNNSIIPEDTFFPSPESSCDVKLVEKSFETDTNLNFQNLSVIGFRILLLKVAGFNLLMTLRLWS

SEQ ID NO: 1040 - protein, 310 aa, Homo sapiens
MDTWLVCWAIFSLLKAGLTEPEVTQTPSHQVTQMGQEVILRCVPISNHLYFYWYRQILGQKVEFLVSFYNNEISEKSEIFDDQFSVERPDGSNFTLKIRSTKLEDSAMYFCASSAGSENTEAFFGQGTRLTVVEDLNKVFPPEVAVFEPSEAEISHTQKATLVCLATGFFPDHVELSWWVNGKEVHSGVSTDPQPLKEQPALNDSRYCLSSRLRVSATFWQNPRNHFRCQVQFYGLSENDEWTQDRAKPVTQIVSAEAWGRADCGFTSVSYQQGVLSATILYEILLGKATLYAVLVSALVLMAMVKRKDF

SEQ ID NO: 1041 - protein, 271 aa, Homo sapiens
METLLGLLILWLQLQWVSSKQEVTQIPAALSVPEGENLVLNCSFTDSAIYNLQWFRQDPGKGLTSLLLIQSSQREQTSGRLNASLDKSSGRSTLYIAASQPGDSATYLCALTSGTYKYIFGTGTRLKVLANIIQNPDPAVYQLRDSKSSDKSVCLFTDFDSQTNVSQSKDSDVYITDKTVLDMRSMDFKSNSAVAWSNKSDFACANAFNNSIIPEDTFFPSPESSCDVKLVEKSFETDTNLNFQNLSVIGFRILLLKVAGFNLLMTLRLWS

SEQ ID NO: 1042 - protein, 312 aa, Homo sapiens
MLCSLLALLLGTFFGVRSQTIHQWPATLVQPVGSPLSLECTVEGTSNPNLYWYRQAAGRGLQLLFYSVGIGQISSEVPQNLSASRPQDRQFILSSKKLLLSDSGFYLCAWSVKFLGQGIDEQFFGPGTRLTVLEDLKNVFPPEVAVFEPSEAEISHTQKATLVCLATGFYPDHVELSWWVNGKEVHSGVSTDPQPLKEQPALNDSRYCLSSRLRVSATFWQNPRNHFRCQVQFYGLSENDEWTQDRAKPVTQIVSAEAWGRADCGFTSESYQQGVLSATILYEILLGKATLYAVLVSALVLMAMVKRKDSRG

SEQ ID NO: 1043 - protein, 276 aa, Homo sapiens
METLLGLLILWLQLQWVSSKQEVTQIPAALSVPEGENLVLNCSFTDSAIYNLQWFRQDPGKGLTSLLLIQSSQREQTSGRLNASLDKSSGRSTLYIAASQPGDSATYLCRGDFGNVLHCFGNVLHCGSGTQVIVLPHIQNPDPAVYQLRDSKSSDKSVCLFTDFDSQTNVSQSKDSDVYITDKTVLDMRSMDFKSNSAVAWSNKSDFACANAFNNSIIPEDTFFPSPESSCDVKLVEKSFETDTNLNFQNLSVIGFRILLLKVAGFNLLMTLRLWS

SEQ ID NO: 1044 - protein, 310 aa, Homo sapiens
MGPGLLCWALLCLLGAGLVDAGVTQSPTHLIKTRGQQVTLRCSPKSGHDTVSWYQQALGQGPQFIFQYYEEEERQRGNFPDRFSGHQFPNYSSELNVNALLLGDSALYLCAGGTGSAGELFFGEGSRLTVLEDLKNVFPPEVAVFEPSEAEISHTQKATLVCLATGFYPDHVELSWWVNGKEVHSGVSTDPQPLKEQPALNDSRYCLSSRLRVSATFWQNPRNHFRCQVQFYGLSENDEWTQDRAKPVTQIVSAEAWGRADCGFTSESYQQGVLSATILYEILLGKATLYAVLVSALVLMAMVKRKDSRG

SEQ ID NO: 1045 - protein, 273 aa, Homo sapiens
METLLKVLSGTLLWQLTWVRSQQPVQSPQAVILREGEDAVINCSSSKALYSVHWYRQKHGEAPVFLMILLKGGEQKGHEKISASFNEKKQQSSLYLTASQLSYSGTYFCGTGFMDTGRRALTFGSGTRLQVQPNIQNPDPAVYQLRDSKSSDKSVCLFTDFDSQTNVSQSKDSDVYITDKTVLDMRSMDFKSNSAVAWSNKSDFACANAFNNSIIPEDTFFPSPESSCDVKLVEKSFETDTNLNFQNLSVIGFRILLLKVAGFNLLMTLRLWS

SEQ ID NO: 1046 - protein, 315 aa, Homo sapiens
MGIRLLCRVAFCFLAVGLVDVKVTQSSRYLVKRTGEKVFLECVQDMDHENMFWYRQDPGLGLRLIYFSYDVKMKEKGDIPEGYSVSREKKERFSLILESASTNQTSMYLCASSLGLAGDGVTDEQFFGPGTRLTVLEDLKNVFPPEVAVFEPSEAEISHTQKATLVCLATGFYPDHVELSWWVNGKEVHSGVSTDPQPLKEQPALNDSRYCLSSRLRVSATFWQNPRNHFRCQVQFYGLSENDEWTQDRAKPVTQIVSAEAWGRADCGFTSESYQQGVLSATILYEILLGKATLYAVLVSALVLMAMVKRKDSRG

SEQ ID NO: 1047 - protein, 272 aa, Homo sapiens
MLLEHLLIILWMQLTWVSGQQLNQSPQSMFIQEGEDVSMNCTSSSIFNTWLWYKQEPGEGPVLLIALYKAGELTSNGRLTAQFGITRKDSFLNISASIPSDVGIYFCAGRMNYGGSQGNLIFGKGTKLSVKPNIQNPDPAVYQLRDSKSSDKSVCLFTDFDSQTNVSQSKDSDVYITDKTVLDMRSMDFKSNSAVAWSNKSDFACANAFNNSIIPEDTFFPSPESSCDVKLVEKSFETDTNLNFQNLSVIGFRILLLKVAGFNLLMTLRLWS

SEQ ID NO: 1048 - protein, 314 aa, Homo sapiens
MTIRLLCYMGFYFLGAGLMEADIYQTPRYLVIGTGKKITLECSQTMGHDKMYWYQQDPGMELHLIHYSYGVNSTEKGDLSSESTVSRIRTEHFPLTLESARPSHTSQYLCASSWRGQGAHLDTQYFGPGTRLTVLEDLKNVFPPEVAVFEPSEAEISHTQKATLVCLATGFYPDHVELSWWVNGKEVHSGVSTDPQPLKEQPALNDSRYCLSSRLRVSATFWQNPRNHFRCQVQFYGLSENDEWTQDRAKPVTQIVSAEAWGRADCGFTSESYQQGVLSATILYEILLGKATLYAVLVSALVLMAMVKRKDSRG

SEQ ID NO: 1049 - protein, 281 aa, Homo sapiens
MDKILGASFLVLWLQLCWVSGQQKEKSDQQQVKQSPQSLIVQKGGISIINCAYENTAFDYFPWYQQFPGKGPALLIAIRPDVSEKKEGRFTISFNKSAKQFSLHIMDSQPGDSATYFCAAVYLTGRRALTFGSGTRLQVQPNIQNPDPAVYQLRDSKSSDKSVCLFTDFDSQTNVSQSKDSDVYITDKTVLDMRSMDFKSNSAVAWSNKSDFACANAFNNSIIPEDTFFPSPESSCDVKLVEKSFETDTNLNFQNLSVIGFRILLLKVAGFNLLMTLRLWS

SEQ ID NO: 1050 - protein, 312 aa, Homo sapiens
MGFRLLCCVAFCLLGAGPVDSGVTQTPKHLITATGQRVTLRCSPRSGDLSVYWYQQSLDQGLQFLIQYYNGEERAKGNILERFSAQQFPDLHSELNLSSLELGDSALYFCASSADGQVQETQYFGPGTRLLVLEDLKNVFPPEVAVFEPSEAEISHTQKATLVCLATGFYPDHVELSWWVNGKEVHSGVSTDPQPLKEQPALNDSRYCLSSRLRVSATFWQNPRNHFRCQVQFYGLSENDEWTQDRAKPVTQIVSAEAWGRADCGFTSESYQQGVLSATILYEILLGKATLYAVLVSALVLMAMVKRKDSRG

SEQ ID NO: 1051 - protein, 272 aa, Homo sapiens
METLLGLLILWLQLQWVSSKQEVTQIPAALSVPEGENLVLNCSFTDSAIYNLQWFRQDPGKGLTSLLLIQSSQREQTSGRLNASLDKSSGRSTLYIAASQPGDSATYLCAACDSWGKFQFEFGAGTQVVVTPDIQNPDPAVYQLRDSKSSDKSVCLFTDFDSQTNVSQSKDSDVYITDKTVLDMRSMDFKSNSAVAWSNKSDFACANAFNNSIIPEDTFFPSPESSCDVKLVEKSFETDTNLNFQNLSVIGFRILLLKVAGFNLLMTLRLWS

SEQ ID NO: 1052 - protein, 310 aa, Homo sapiens
MGTRLLCWAALCLLGAELTEAGVAQSPRYKIIEKRQSVAFWCNPISGHATLYWYQQILGQGPKLLIQFQNNGVVDDSQLPKDRFSAERLKGVDSTLKIQPAKLEDSAVYLCASSLQAETQYFGPGTRLLVLEDLKNVFPPEVAVFEPSEAEISHTQKATLVCLATGFYPDHVELSWWVNGKEVHSGVSTDPQPLKEQPALNDSRYCLSSRLRVSATFWQNPRNHFRCQVQFYGLSENDEWTQDRAKPVTQIVSAEAWGRADCGFTSESYQQGVLSATILYEILLGKATLYAVLVSALVLMAMVKRKDSRG

SEQ ID NO: 1053 - protein, 269 aa, Homo sapiens
METLLGLLILWLQLQWVSSKQEVTQIPAALSVPEGENLVLNCSFTDSAIYNLQWFRQDPGKGLTSLLLIQSSQREQTSGRLNASLDKSSGRSTLYIAASQPGDSATYLCAVWDTGKLIFGQGTTLQVKPDIQNPDPAVYQLRDSKSSDKSVCLFTDFDSQTNVSQSKDSDVYITDKTVLDMRSMDFKSNSAVAWSNKSDFACANAFNNSIIPEDTFFPSPESSCDVKLVEKSFETDTNLNFQNLSVIGFRILLLKVAGFNLLMTLRLWS

SEQ ID NO: 1054 - protein, 310 aa, Homo sapiens
MGPGLLHWMALCLLGTGHGDAMVIQNPRYQVTQFGKPVTLSCSQTLNHNVMYWYQQKSSQAPKLLFHYYDKDFNNEADTPDNFQSRRPNTSFCFLDIRSPGLGDTAMYLCATSRDQGHEQFFGPGTRLTVLEDLKNVFPPEVAVFEPSEAEISHTQKATLVCLATGFYPDHVELSWWVNGKEVHSGVSTDPQPLKEQPALNDSRYCLSSRLRVSATFWQNPRNHFRCQVQFYGLSENDEWTQDRAKPVTQIVSAEAWGRADCGFTSESYQQGVLSATILYEILLGKATLYAVLVSALVLMAMVKRKDSRG

SEQ ID NO: 1055 - protein, 9 aa, Severe acute respiratory syndrome coronavirus 2
VYFLQSINF

SEQ ID NO: 1056 - protein, 311 aa, Homo sapiens
MGTSLLCWMALCLLGADHADTGVSQNPRHKITKRGQNVTFRCDPISEHNRLYWYRQTLGQGPEFLTYFQNEAQLEKSRLLSDRFSAERPKGSFSTLEIQRTEQGDSAMYLCASSLGNGETQYFGPGTRLLVLEDLKNVFPPEVAVFEPSEAEISHTQKATLVCLATGFYPDHVELSWWVNGKEVHSGVSTDPQPLKEQPALNDSRYCLSSRLRVSATFWQNPRNHFRCQVQFYGLSENDEWTQDRAKPVTQIVSAEAWGRADCGFTSESYQQGVLSATILYEILLGKATLYAVLVSALVLMAMVKRKDSRG

SEQ ID NO: 1057 - protein, 277 aa, Homo sapiens
MAMLLGASVLILWLQPDWVNSQQKNDDQQVKQNSPSLSVQEGRISILNCDYTNSMFDYFLWYKKYPAEGPTFLISISSIKDKNEDGRFTVFLNKSAKHLSLHIVPSQPGDSAVYFCAASALRVDMRFGAGTRLTVKPNIQNPDPAVYQLRDSKSSDKSVCLFTDFDSQTNVSQSKDSDVYITDKTVLDMRSMDFKSNSAVAWSNKSDFACANAFNNSIIPEDTFFPSPESSCDVKLVEKSFETDTNLNFQNLSVIGFRILLLKVAGFNLLMTLRLWS

SEQ ID NO: 1058 - protein, 8 aa, Severe acute respiratory syndrome coronavirus 2
SPRWFYYL

SEQ ID NO: 1059 - protein, 269 aa, Homo sapiens
MNYSPGLVSLILLLLGRTRGNSVTQMEGPVTLSEEAFLTINCTYTATGYPSLFWYVQYPGEGLQLLLKATKADDKGSNKGFEATYRKETTSFHLEKGSVQVSDSAVYFCGSRSASKIIFGSGTRLSIRPNIQNPDPAVYQLRDSKSSDKSVCLFTDFDSQTNVSQSKDSDVYITDKTVLDMRSMDFKSNSAVAWSNKSDFACANAFNNSIIPEDTFFPSPESSCDVKLVEKSFETDTNLNFQNLSVIGFRILLLKVAGFNLLMTLRLWS

SEQ ID NO: 1060 - protein, 313 aa, Homo sapiens
MDTWLVCWAIFSLLKAGLTEPEVTQTPSHQVTQMGQEVILRCVPISNHLYFYWYRQILGQKVEFLVSFYNNEISEKSEIFDDQFSVERPDGSNFTLKIRSTKLEDSAMYFCASSQLAGGYNEQFFGPGTRLTVLEDLKNVFPPEVAVFEPSEAEISHTQKATLVCLATGFYPDHVELSWWVNGKEVHSGVSTDPQPLKEQPALNDSRYCLSSRLRVSATFWQNPRNHFRCQVQFYGLSENDEWTQDRAKPVTQIVSAEAWGRADCGFTSESYQQGVLSATILYEILLGKATLYAVLVSALVLMAMVKRKDSRG

SEQ ID NO: 1061 - protein, 270 aa, Homo sapiens
MWGVFLLYVSMKMGGTTGQNIDQPTEMTATEGAIVQINCTYQTSGFNGLFWYQQHAGEAPTFLSYNVLDGLEEKGRFSSFLSRSKGYSYLLLKELQMKDSASYLCAVRVNAGAGSYQLTFGKGTKLSVIPNIQNPDPAVYQLRDSKSSDKSVCLFTDFDSQTNVSQSKDSDVYITDKTVLDMRSMDFKSNSAVAWSNKSDFACANAFNNSIIPEDTFFPSPESSCDVKLVEKSFETDTNLNFQNLSVIGFRILLLKVAGFNLLMTLRLWS

SEQ ID NO: 1062 - protein, 316 aa, Homo sapiens
MSIGLLCCAALSLLWAGPVNAGVTQTPKFQVLKTGQSMTLQCAQDMNHEYMSWYRQDPGMGLRLIHYSVGAGITDQGEVPNGYNVSRSTTEDFPLRLLSAAPSQTSVYFCASSERGLLTSGTYNEQFFGPGTRLTVLEDLKNVFPPEVAVFEPSEAEISHTQKATLVCLATGFYPDHVELSWWVNGKEVHSGVSTDPQPLKEQPALNDSRYCLSSRLRVSATFWQNPRNHFRCQVQFYGLSENDEWTQDRAKPVTQIVSAEAWGRADCGFTSESYQQGVLSATILYEILLGKATLYAVLVSALVLMAMVKRKDSRG

SEQ ID NO: 1063 - protein, 272 aa, Homo sapiens
MKTFAGFSFLFLWLQLDCMSRGEDVEQSLFLSVREGDSSVINCTYTDSSSTYLYWYKQEPGAGLQLLTYIFSNMDMKQDQRLTVLLNKKDKHLSLRIADTQTGDSAIYFCAERGGGFKTIFGAGTRLFVKANIIQNPDPAVYQLRDSKSSDKSVCLFTDFDSQTNVSQSKDSDVYITDKTVLDMRSMDFKSNSAVAWSNKSDFACANAFNNSIIPEDTFFPSPESSCDVKLVEKSFETDTNLNFQNLSVIGFRILLLKVAGFNLLMTLRLWS

SEQ ID NO: 1064 - protein, 310 aa, Homo sapiens
MGSRLLCWVLLCLLGAGPVKAGVTQTPRYLIKTRGQQVTLSCSPISGHRSVSWYQQTPGQGLQFLFEYFSETQRNKGNFPGRFSGRQFSNSRSEMNVSTLELGDSALYLCASSTRDSPNTEAFFGQGTRLTVVEDLNKVFPPEVAVFEPSEAEISHTQKATLVCLATGFFPDHVELSWWVNGKEVHSGVSTDPQPLKEQPALNDSRYCLSSRLRVSATFWQNPRNHFRCQVQFYGLSENDEWTQDRAKPVTQIVSAEAWGRADCGFTSVSYQQGVLSATILYEILLGKATLYAVLVSALVLMAMVKRKDF

SEQ ID NO: 1065 - protein, 265 aa, Homo sapiens
MRQVARVIVFLTLSTLSLAKTTQPISMDSYEGQEVNITCSHNNIATNDYITWYQQFPSQGPRFIIQGYKTKVTNEVASLFIPADRKSSTLSLPRVSLSDTAVYYCLTNRDDKIIFGKGTRLHILPNIQNPDPAVYQLRDSKSSDKSVCLFTDFDSQTNVSQSKDSDVYITDKTVLDMRSMDFKSNSAVAWSNKSDFACANAFNNSIIPEDTFFPSPESSCDVKLVEKSFETDTNLNFQNLSVIGFRILLLKVAGFNLLMTLRLWS

SEQ ID NO: 1066 - protein, 313 aa, Homo sapiens
MDTRVLCCAVICLLGAGLSNAGVMQNPRHLVRRRGQEARLRCSPMKGHSHVYWYRQLPEEGLKFMVYLQKENIIDESGMPKERFSAEFPKEGPSILRIQQVVRGDSAAYFCASSDRRDKGETQYFGPGTRLLVLEDLKNVFPPEVAVFEPSEAEISHTQKATLVCLATGFYPDHVELSWWVNGKEVHSGVSTDPQPLKEQPALNDSRYCLSSRLRVSATFWQNPRNHFRCQVQFYGLSENDEWTQDRAKPVTQIVSAEAWGRADCGFTSESYQQGVLSATILYEILLGKATLYAVLVSALVLMAMVKRKDSRG

SEQ ID NO: 1067 - protein, 265 aa, Homo sapiens
MRQVARVIVFLTLSTLSLAKTTQPISMDSYEGQEVNITCSHNNIATNDYITWYQQFPSQGPRFIIQGYKTKVTNEVASLFIPADRKSSTLSLPRVSLSDTAVYYCLGRAGTALIFGKGTTLSVSSNIQNPDPAVYQLRDSKSSDKSVCLFTDFDSQTNVSQSKDSDVYITDKTVLDMRSMDFKSNSAVAWSNKSDFACANAFNNSIIPEDTFFPSPESSCDVKLVEKSFETDTNLNFQNLSVIGFRILLLKVAGFNLLMTLRLWS

SEQ ID NO: 1068 - protein, 315 aa, Homo sapiens
MGPQLLGYVVLCLLGAGPLEAQVTQNPRYLITVTGKKLTVTCSQNMNHEYMSWYRQDPGLGLRQIYYSMNVEVTDKGDVPEGYKVSRKEKRNFPLILESPSPNQTSLYFCASSLLTGRDEAKNIQYFGAGTRLSVLEDLKNVFPPEVAVFEPSEAEISHTQKATLVCLATGFYPDHVELSWWVNGKEVHSGVSTDPQPLKEQPALNDSRYCLSSRLRVSATFWQNPRNHFRCQVQFYGLSENDEWTQDRAKPVTQIVSAEAWGRADCGFTSESYQQGVLSATILYEILLGKATLYAVLVSALVLMAMVKRKDSRG

SEQ ID NO: 1069 - protein, 272 aa, Homo sapiens
METLLGLLILWLQLQWVSSKQEVTQIPAALSVPEGENLVLNCSFTDSAIYNLQWFRQDPGKGLTSLLLIQSSQREQTSGRLNASLDKSSGRSTLYIAASQPGDSATYLCAVPKPYRDDKIIFGKGTRLHILPNIQNPDPAVYQLRDSKSSDKSVCLFTDFDSQTNVSQSKDSDVYITDKTVLDMRSMDFKSNSAVAWSNKSDFACANAFNNSIIPEDTFFPSPESSCDVKLVEKSFETDTNLNFQNLSVIGFRILLLKVAGFNLLMTLRLWS

SEQ ID NO: 1070 - protein, 313 aa, Homo sapiens
MGPQLLGYVVLCLLGAGPLEAQVTQNPRYLITVTGKKLTVTCSQNMNHEYMSWYRQDPGLGLRQIYYSMNVEVTDKGDVPEGYKVSRKEKRNFPLILESPSPNQTSLYFCASSSIQGAAKNIQYFGAGTRLSVLEDLKNVFPPEVAVFEPSEAEISHTQKATLVCLATGFYPDHVELSWWVNGKEVHSGVSTDPQPLKEQPALNDSRYCLSSRLRVSATFWQNPRNHFRCQVQFYGLSENDEWTQDRAKPVTQIVSAEAWGRADCGFTSESYQQGVLSATILYEILLGKATLYAVLVSALVLMAMVKRKDSRG

SEQ ID NO: 1071 - protein, 269 aa, Homo sapiens
MLLEHLLIILWMQLTWVSGQQLNQSPQSMFIQEGEDVSMNCTSSSIFNTWLWYKQEPGEGPVLLIALYKAGELTSNGRLTAQFGITRKDSFLNISASIPSDVGIYFCAGQLPYGNKLVFGAGTILRVKSYIQNPDPAVYQLRDSKSSDKSVCLFTDFDSQTNVSQSKDSDVYITDKTVLDMRSMDFKSNSAVAWSNKSDFACANAFNNSIIPEDTFFPSPESSCDVKLVEKSFETDTNLNFQNLSVIGFRILLLKVAGFNLLMTLRLWS

SEQ ID NO: 1072 - protein, 310 aa, Homo sapiens
MGSRLLCWVLLCLLGAGPVKAGVTQTPRYLIKTRGQQVTLSCSPISGHRSVSWYQQTPGQGLQFLFEYFSETQRNKGNFPGRFSGRQFSNSRSEMNVSTLELGDSALYLCASSLAGAYEQYFGPGTRLTVTEDLKNVFPPEVAVFEPSEAEISHTQKATLVCLATGFYPDHVELSWWVNGKEVHSGVSTDPQPLKEQPALNDSRYCLSSRLRVSATFWQNPRNHFRCQVQFYGLSENDEWTQDRAKPVTQIVSAEAWGRADCGFTSESYQQGVLSATILYEILLGKATLYAVLVSALVLMAMVKRKDSRG

SEQ ID NO: 1073 - protein, 272 aa, Homo sapiens
MNYSPGLVSLILLLLGRTRGNSVTQMEGPVTLSEEAFLTINCTYTATGYPSLFWYVQYPGEGLQLLLKATKADDKGSNKGFEATYRKETTSFHLEKGSVQVSDSAVYFCALYQYNFNKFYFGSGTKLNVKPNIIQNPDPAVYQLRDSKSSDKSVCLFTDFDSQTNVSQSKDSDVYITDKTVLDMRSMDFKSNSAVAWSNKSDFACANAFNNSIIPEDTFFPSPESSCDVKLVEKSFETDTNLNFQNLSVIGFRILLLKVAGFNLLMTLRLWS

SEQ ID NO: 1074 - protein, 313 aa, Homo sapiens
MATRLLCCVVLCLLGEELIDARVTQTPRHKVTEMGQEVTMRCQPILGHNTVFWYRQTMMQGLELLAYFRNRAPLDDSGMPKDRFSAEMPDATLATLKIQPSEPRDSAVYFCASGPGVAGRNEQFFGPGTRLTVLEDLKNVFPPEVAVFEPSEAEISHTQKATLVCLATGFYPDHVELSWWVNGKEVHSGVSTDPQPLKEQPALNDSRYCLSSRLRVSATFWQNPRNHFRCQVQFYGLSENDEWTQDRAKPVTQIVSAEAWGRADCGFTSESYQQGVLSATILYEILLGKATLYAVLVSALVLMAMVKRKDSRG

SEQ ID NO: 1075 - protein, 270 aa, Homo sapiens
MLLLLIPVLGMIFALRDARAQSVSQHNHHVILSEAASLELGCNYSYGGTVNLFWYVQYPGQHLQLLLKYFSGDPLVKGIKGFEAEFIKSKFSFNLRKPSVQWSDTAEYFCAVGFDKLIFGTGTRLQVFPNIIQNPDPAVYQLRDSKSSDKSVCLFTDFDSQTNVSQSKDSDVYITDKTVLDMRSMDFKSNSAVAWSNKSDFACANAFNNSIIPEDTFFPSPESSCDVKLVEKSFETDTNLNFQNLSVIGFRILLLKVAGFNLLMTLRLWS

SEQ ID NO: 1076 - protein, 275 aa, Homo sapiens
MEKNPLAAPLLILWFHLDCVSSILNVEQSPQSLHVQEGDSTNFTCSFPSSNFYALHWYRWETAKSPEALFVMTLNGDEKKKGRISATLNTKEGYSYLYIKGSQPEDSATYLCAFRPTGGFKTIFGAGTRLFVKANIIQNPDPAVYQLRDSKSSDKSVCLFTDFDSQTNVSQSKDSDVYITDKTVLDMRSMDFKSNSAVAWSNKSDFACANAFNNSIIPEDTFFPSPESSCDVKLVEKSFETDTNLNFQNLSVIGFRILLLKVAGFNLLMTLRLWS

SEQ ID NO: 1077 - protein, 309 aa, Homo sapiens
MGPGLLHWMALCLLGTGHGDAMVIQNPRYQVTQFGKPVTLSCSQTLNHNVMYWYQQKSSQAPKLLFHYYDKDFNNEADTPDNFQSRRPNTSFCFLDIRSPGLGDTAMYLCATISEVVSTEAFFGQGTRLTVVEDLNKVFPPEVAVFEPSEAEISHTQKATLVCLATGFFPDHVELSWWVNGKEVHSGVSTDPQPLKEQPALNDSRYCLSSRLRVSATFWQNPRNHFRCQVQFYGLSENDEWTQDRAKPVTQIVSAEAWGRADCGFTSVSYQQGVLSATILYEILLGKATLYAVLVSALVLMAMVKRKDF

SEQ ID NO: 1078 - protein, 265 aa, Homo sapiens
MRQVARVIVFLTLSTLSLAKTTQPISMDSYEGQEVNITCSHNNIATNDYITWYQQFPSQGPRFIIQGYKTKVTNEVASLFIPADRKSSTLSLPRVSLSDTAVYYCLTQRDDKIIFGKGTRLHILPNIQNPDPAVYQLRDSKSSDKSVCLFTDFDSQTNVSQSKDSDVYITDKTVLDMRSMDFKSNSAVAWSNKSDFACANAFNNSIIPEDTFFPSPESSCDVKLVEKSFETDTNLNFQNLSVIGFRILLLKVAGFNLLMTLRLWS

SEQ ID NO: 1079 - protein, 311 aa, Homo sapiens
MGPGLLCWVLLCLLGAGPVDAGVTQSPTHLIKTRGQQVTLRCSPISGHKSVSWYQQVLGQGPQFIFQYYEKEERGRGNFPDRFSARQFPNYSSELNVNALLLGDSALYLCASSFLIPGPNQPQHFGDGTRLSILEDLNKVFPPEVAVFEPSEAEISHTQKATLVCLATGFFPDHVELSWWVNGKEVHSGVSTDPQPLKEQPALNDSRYCLSSRLRVSATFWQNPRNHFRCQVQFYGLSENDEWTQDRAKPVTQIVSAEAWGRADCGFTSVSYQQGVLSATILYEILLGKATLYAVLVSALVLMAMVKRKDF

SEQ ID NO: 1080 - protein, 272 aa, Homo sapiens
MKTFAGFSFLFLWLQLDCMSRGEDVEQSLFLSVREGDSSVINCTYTDSSSTYLYWYKQEPGAGLQLLTYIFSNMDMKQDQRLTVLLNKKDKHLSLRIADTQTGDSAIYFCAESINSASKIIFGSGTRLSIRPNIQNPDPAVYQLRDSKSSDKSVCLFTDFDSQTNVSQSKDSDVYITDKTVLDMRSMDFKSNSAVAWSNKSDFACANAFNNSIIPEDTFFPSPESSCDVKLVEKSFETDTNLNFQNLSVIGFRILLLKVAGFNLLMTLRLWS

SEQ ID NO: 1081 - protein, 307 aa, Homo sapiens
MGPQLLGYVVLCLLGAGPLEAQVTQNPRYLITVTGKKLTVTCSQNMNHEYMSWYRQDPGLGLRQIYYSMNVEVTDKGDVPEGYKVSRKEKRNFPLILESPSPNQTSLYFCASRTGAAGYTFGSGTRLTVVEDLNKVFPPEVAVFEPSEAEISHTQKATLVCLATGFFPDHVELSWWVNGKEVHSGVSTDPQPLKEQPALNDSRYCLSSRLRVSATFWQNPRNHFRCQVQFYGLSENDEWTQDRAKPVTQIVSAEAWGRADCGFTSVSYQQGVLSATILYEILLGKATLYAVLVSALVLMAMVKRKDF

SEQ ID NO: 1082 - protein, 272 aa, Homo sapiens
MLTASLLRAVIASICVVSSMAQKVTQAQTEISVVEKEDVTLDCVYETRDTTYYLFWYKQPPSGELVFLIRRNSFDEQNEISGRYSWNFQKSTSSFNFTITASQVVDSAVYFCALRREGKSTFGDGTTLTVKPNIQNPDPAVYQLRDSKSSDKSVCLFTDFDSQTNVSQSKDSDVYITDKTVLDMRSMDFKSNSAVAWSNKSDFACANAFNNSIIPEDTFFPSPESSCDVKLVEKSFETDTNLNFQNLSVIGFRILLLKVAGFNLLMTLRLWS

SEQ ID NO: 1083 - protein, 313 aa, Homo sapiens
MSIGLLCCAALSLLWAGPVNAGVTQTPKFQVLKTGQSMTLQCAQDMNHEYMSWYRQDPGMGLRLIHYSVGAGITDQGEVPNGYNVSRSTTEDFPLRLLSAAPSQTSVYFCASSYLTGVDKNIQYFGAGTRLSVLEDLKNVFPPEVAVFEPSEAEISHTQKATLVCLATGFYPDHVELSWWVNGKEVHSGVSTDPQPLKEQPALNDSRYCLSSRLRVSATFWQNPRNHFRCQVQFYGLSENDEWTQDRAKPVTQIVSAEAWGRADCGFTSESYQQGVLSATILYEILLGKATLYAVLVSALVLMAMVKRKDSRG

SEQ ID NO: 1084 - protein, 269 aa, Homo sapiens
METLLGLLILWLQLQWVSSKQEVTQIPAALSVPEGENLVLNCSFTDSAIYNLQWFRQDPGKGLTSLLLIQSSQREQTSGRLNASLDKSSGRSTLYIAASQPGDSATYLCAVLNTGKLIFGQGTTLQVKPDIQNPDPAVYQLRDSKSSDKSVCLFTDFDSQTNVSQSKDSDVYITDKTVLDMRSMDFKSNSAVAWSNKSDFACANAFNNSIIPEDTFFPSPESSCDVKLVEKSFETDTNLNFQNLSVIGFRILLLKVAGFNLLMTLRLWS

SEQ ID NO: 1085 - protein, 310 aa, Homo sapiens
MGSRLLCWVLLCLLGAGPVKAGVTQTPRYLIKTRGQQVTLSCSPISGHRSVSWYQQTPGQGLQFLFEYFSETQRNKGNFPGRFSGRQFSNSRSEMNVSTLELGDSALYLCASSLAGANEQFFGPGTRLTVLEDLKNVFPPEVAVFEPSEAEISHTQKATLVCLATGFYPDHVELSWWVNGKEVHSGVSTDPQPLKEQPALNDSRYCLSSRLRVSATFWQNPRNHFRCQVQFYGLSENDEWTQDRAKPVTQIVSAEAWGRADCGFTSESYQQGVLSATILYEILLGKATLYAVLVSALVLMAMVKRKDSRG

SEQ ID NO: 1086 - protein, 273 aa, Homo sapiens
MLLELIPLLGIHFVLRTARAQSVTQPDIHITVSEGASLELRCNYSYGATPYLFWYVQSPGQGLQLLLKYFSGDTLVQGIKGFEAEFKRSQSSFNLRKPSVHWSDAAEYFCAVGPTGTASKLTFGTGTRLQVTLDIQNPDPAVYQLRDSKSSDKSVCLFTDFDSQTNVSQSKDSDVYITDKTVLDMRSMDFKSNSAVAWSNKSDFACANAFNNSIIPEDTFFPSPESSCDVKLVEKSFETDTNLNFQNLSVIGFRILLLKVAGFNLLMTLRLWS

SEQ ID NO: 1087 - protein, 315 aa, Homo sapiens
MGPQLLGYVVLCLLGAGPLEAQVTQNPRYLITVTGKKLTVTCSQNMNHEYMSWYRQDPGLGLRQIYYSMNVEVTDKGDVPEGYKVSRKEKRNFPLILESPSPNQTSLYFCASSPIVGRPEVKNIQYFGAGTRLSVLEDLKNVFPPEVAVFEPSEAEISHTQKATLVCLATGFYPDHVELSWWVNGKEVHSGVSTDPQPLKEQPALNDSRYCLSSRLRVSATFWQNPRNHFRCQVQFYGLSENDEWTQDRAKPVTQIVSAEAWGRADCGFTSESYQQGVLSATILYEILLGKATLYAVLVSALVLMAMVKRKDSRG

SEQ ID NO: 1088 - protein, 271 aa, Homo sapiens
MTSIRAVFIFLWLQLDLVNGENVEQHPSTLSVQEGDSAVIKCTYSDSASNYFPWYKQELGKGPQLIIDIRSNVGEKKDQRIAVTLNKTAKHFSLHITETQPEDSAVYFCAALSGGYQKVTFGIGTKLQVIPNIQNPDPAVYQLRDSKSSDKSVCLFTDFDSQTNVSQSKDSDVYITDKTVLDMRSMDFKSNSAVAWSNKSDFACANAFNNSIIPEDTFFPSPESSCDVKLVEKSFETDTNLNFQNLSVIGFRILLLKVAGFNLLMTLRLWS

SEQ ID NO: 1089 - protein, 312 aa, Homo sapiens
MGIRLLCRVAFCFLAVGLVDVKVTQSSRYLVKRTGEKVFLECVQDMDHENMFWYRQDPGLGLRLIYFSYDVKMKEKGDIPEGYSVSREKKERFSLILESASTNQTSMYLCASSFIGRREGNYGYTFGSGTRLTVVEDLNKVFPPEVAVFEPSEAEISHTQKATLVCLATGFFPDHVELSWWVNGKEVHSGVSTDPQPLKEQPALNDSRYCLSSRLRVSATFWQNPRNHFRCQVQFYGLSENDEWTQDRAKPVTQIVSAEAWGRADCGFTSVSYQQGVLSATILYEILLGKATLYAVLVSALVLMAMVKRKDF

SEQ ID NO: 1090 - protein, 270 aa, Homo sapiens
METLLGLLILWLQLQWVSSKQEVTQIPAALSVPEGENLVLNCSFTDSAIYNLQWFRQDPGKGLTSLLLIQSSQREQTSGRLNASLDKSSGRSTLYIAASQPGDSATYLCAVQRTNARLMFGDGTQLVVKPNIQNPDPAVYQLRDSKSSDKSVCLFTDFDSQTNVSQSKDSDVYITDKTVLDMRSMDFKSNSAVAWSNKSDFACANAFNNSIIPEDTFFPSPESSCDVKLVEKSFETDTNLNFQNLSVIGFRILLLKVAGFNLLMTLRLWS

SEQ ID NO: 1091 - protein, 315 aa, Homo sapiens
MGPQLLGYVVLCLLGAGPLEAQVTQNPRYLITVTGKKLTVTCSQNMNHEYMSWYRQDPGLGLRQIYYSMNVEVTDKGDVPEGYKVSRKEKRNFPLILESPSPNQTSLYFCASSPLTGELRQKNIQYFGAGTRLSVLEDLKNVFPPEVAVFEPSEAEISHTQKATLVCLATGFYPDHVELSWWVNGKEVHSGVSTDPQPLKEQPALNDSRYCLSSRLRVSATFWQNPRNHFRCQVQFYGLSENDEWTQDRAKPVTQIVSAEAWGRADCGFTSESYQQGVLSATILYEILLGKATLYAVLVSALVLMAMVKRKDSRG

SEQ ID NO: 1092 - protein, 272 aa, Homo sapiens
MRQVARVIVFLTLSTLSLAKTTQPISMDSYEGQEVNITCSHNNIATNDYITWYQQFPSQGPRFIIQGYKTKVTNEVASLFIPADRKSSTLSLPRVSLSDTAVYYCLVGDRILTGGGNKLTFGTGTQLKVELNIIQNPDPAVYQLRDSKSSDKSVCLFTDFDSQTNVSQSKDSDVYITDKTVLDMRSMDFKSNSAVAWSNKSDFACANAFNNSIIPEDTFFPSPESSCDVKLVEKSFETDTNLNFQNLSVIGFRILLLKVAGFNLLMTLRLWS

SEQ ID NO: 1093 - protein, 312 aa, Homo sapiens
MGTRLLFWVAFCLLGADHTGAGVSQSPSNKVTEKGKDVELRCDPISGHTALYWYRQSLGQGLEFLIYFQGNSAPDKSGLPSDRFSAERTGGSVSTLTIQRTQQEDSAVYLCASSLVSGAGNQPQHFGDGTRLSILEDLNKVFPPEVAVFEPSEAEISHTQKATLVCLATGFFPDHVELSWWVNGKEVHSGVSTDPQPLKEQPALNDSRYCLSSRLRVSATFWQNPRNHFRCQVQFYGLSENDEWTQDRAKPVTQIVSAEAWGRADCGFTSVSYQQGVLSATILYEILLGKATLYAVLVSALVLMAMVKRKDF

SEQ ID NO: 1094 - protein, 269 aa, Homo sapiens
MRQVARVIVFLTLSTLSLAKTTQPISMDSYEGQEVNITCSHNNIATNDYITWYQQFPSQGPRFIIQGYKTKVTNEVASLFIPADRKSSTLSLPRVSLSDTAVYYCLVGERSGGYNKLIFGAGTRLAVHPYIQNPDPAVYQLRDSKSSDKSVCLFTDFDSQTNVSQSKDSDVYITDKTVLDMRSMDFKSNSAVAWSNKSDFACANAFNNSIIPEDTFFPSPESSCDVKLVEKSFETDTNLNFQNLSVIGFRILLLKVAGFNLLMTLRLWS

SEQ ID NO: 1095 - protein, 310 aa, Homo sapiens
MGIRLLCRVAFCFLAVGLVDVKVTQSSRYLVKRTGEKVFLECVQDMDHENMFWYRQDPGLGLRLIYFSYDVKMKEKGDIPEGYSVSREKKERFSLILESASTNQTSMYLCASSPFISSTPEAFFGQGTRLTVVEDLNKVFPPEVAVFEPSEAEISHTQKATLVCLATGFFPDHVELSWWVNGKEVHSGVSTDPQPLKEQPALNDSRYCLSSRLRVSATFWQNPRNHFRCQVQFYGLSENDEWTQDRAKPVTQIVSAEAWGRADCGFTSVSYQQGVLSATILYEILLGKATLYAVLVSALVLMAMVKRKDF

SEQ ID NO: 1096 - protein, 279 aa, Homo sapiens
MAMLLGASVLILWLQPDWVNSQQKNDDQQVKQNSPSLSVQEGRISILNCDYTNSMFDYFLWYKKYPAEGPTFLISISSIKDKNEDGRFTVFLNKSAKHLSLHIVPSQPGDSAVYFCAASYMNRDDKIIFGKGTRLHILPNIQNPDPAVYQLRDSKSSDKSVCLFTDFDSQTNVSQSKDSDVYITDKTVLDMRSMDFKSNSAVAWSNKSDFACANAFNNSIIPEDTFFPSPESSCDVKLVEKSFETDTNLNFQNLSVIGFRILLLKVAGFNLLMTLRLWS

SEQ ID NO: 1097 - protein, 309 aa, Homo sapiens
MGTSLLCWMALCLLGADHADTGVSQNPRHKITKRGQNVTFRCDPISEHNRLYWYRQTLGQGPEFLTYFQNEAQLEKSRLLSDRFSAERPKGSFSTLEIQRTEQGDSAMYLCASSQGVTTEAFFGQGTRLTVVEDLNKVFPPEVAVFEPSEAEISHTQKATLVCLATGFFPDHVELSWWVNGKEVHSGVSTDPQPLKEQPALNDSRYCLSSRLRVSATFWQNPRNHFRCQVQFYGLSENDEWTQDRAKPVTQIVSAEAWGRADCGFTSVSYQQGVLSATILYEILLGKATLYAVLVSALVLMAMVKRKDF

SEQ ID NO: 1098 - protein, 275 aa, Homo sapiens
MKSLRVLLVILWLQLSWVWSQQKEVEQNSGPLSVPEGAIASLNCTYSDRGSQSFFWYRQYSGKSPELIMFIYSNGDKEDGRFTAQLNKASQYVSLLIRDSQPSDSATYLCAVKGPSGAGSYQLTFGKGTKLSVIPNIQNPDPAVYQLRDSKSSDKSVCLFTDFDSQTNVSQSKDSDVYITDKTVLDMRSMDFKSNSAVAWSNKSDFACANAFNNSIIPEDTFFPSPESSCDVKLVEKSFETDTNLNFQNLSVIGFRILLLKVAGFNLLMTLRLWS

SEQ ID NO: 1099 - protein, 314 aa, Homo sapiens
MGPQLLGYVVLCLLGAGPLEAQVTQNPRYLITVTGKKLTVTCSQNMNHEYMSWYRQDPGLGLRQIYYSMNVEVTDKGDVPEGYKVSRKEKRNFPLILESPSPNQTSLYFCASSVRGLAGRRNEQFFGPGTRLTVLEDLKNVFPPEVAVFEPSEAEISHTQKATLVCLATGFYPDHVELSWWVNGKEVHSGVSTDPQPLKEQPALNDSRYCLSSRLRVSATFWQNPRNHFRCQVQFYGLSENDEWTQDRAKPVTQIVSAEAWGRADCGFTSESYQQGVLSATILYEILLGKATLYAVLVSALVLMAMVKRKDSRG

SEQ ID NO: 1100 - protein, 269 aa, Homo sapiens
METLLKVLSGTLLWQLTWVRSQQPVQSPQAVILREGEDAVINCSSSKALYSVHWYRQKHGEAPVFLMILLKGGEQKGHEKISASFNEKKQQSSLYLTASQLSYSGTYFCGTTKEGKSTFGDGTTLTVKPNIQNPDPAVYQLRDSKSSDKSVCLFTDFDSQTNVSQSKDSDVYITDKTVLDMRSMDFKSNSAVAWSNKSDFACANAFNNSIIPEDTFFPSPESSCDVKLVEKSFETDTNLNFQNLSVIGFRILLLKVAGFNLLMTLRLWS

SEQ ID NO: 1101 - protein, 315 aa, Homo sapiens
MGPQLLGYVVLCLLGAGPLEAQVTQNPRYLITVTGKKLTVTCSQNMNHEYMSWYRQDPGLGLRQIYYSMNVEVTDKGDVPEGYKVSRKEKRNFPLILESPSPNQTSLYFCASSSLVGSPEDKNIQYFGAGTRLSVLEDLKNVFPPEVAVFEPSEAEISHTQKATLVCLATGFYPDHVELSWWVNGKEVHSGVSTDPQPLKEQPALNDSRYCLSSRLRVSATFWQNPRNHFRCQVQFYGLSENDEWTQDRAKPVTQIVSAEAWGRADCGFTSESYQQGVLSATILYEILLGKATLYAVLVSALVLMAMVKRKDSRG

SEQ ID NO: 1102 - protein, 272 aa, Homo sapiens
MTSIRAVFIFLWLQLDLVNGENVEQHPSTLSVQEGDSAVIKCTYSDSASNYFPWYKQELGKGPQLIIDIRSNVGEKKDQRIAVTLNKTAKHFSLHITETQPEDSAVYFCAASMAGGYNKLIFGAGTRLAVHPYIQNPDPAVYQLRDSKSSDKSVCLFTDFDSQTNVSQSKDSDVYITDKTVLDMRSMDFKSNSAVAWSNKSDFACANAFNNSIIPEDTFFPSPESSCDVKLVEKSFETDTNLNFQNLSVIGFRILLLKVAGFNLLMTLRLWS

SEQ ID NO: 1103 - protein, 312 aa, Homo sapiens
MTIRLLCYMGFYFLGAGLMEADIYQTPRYLVIGTGKKITLECSQTMGHDKMYWYQQDPGMELHLIHYSYGVNSTEKGDLSSESTVSRIRTEHFPLTLESARPSHTSQYLCASSGLTSASNEQFFGPGTRLTVLEDLKNVFPPEVAVFEPSEAEISHTQKATLVCLATGFYPDHVELSWWVNGKEVHSGVSTDPQPLKEQPALNDSRYCLSSRLRVSATFWQNPRNHFRCQVQFYGLSENDEWTQDRAKPVTQIVSAEAWGRADCGFTSESYQQGVLSATILYEILLGKATLYAVLVSALVLMAMVKRKDSRG

SEQ ID NO: 1104 - protein, 271 aa, Homo sapiens
MTSIRAVFIFLWLQLDLVNGENVEQHPSTLSVQEGDSAVIKCTYSDSASNYFPWYKQELGKGPQLIIDIRSNVGEKKDQRIAVTLNKTAKHFSLHITETQPEDSAVYFCAASNPNAGKSTFGDGTTLTVKPNIQNPDPAVYQLRDSKSSDKSVCLFTDFDSQTNVSQSKDSDVYITDKTVLDMRSMDFKSNSAVAWSNKSDFACANAFNNSIIPEDTFFPSPESSCDVKLVEKSFETDTNLNFQNLSVIGFRILLLKVAGFNLLMTLRLWS

SEQ ID NO: 1105 - protein, 273 aa, Homo sapiens
MISLRVLLVILWLQLSWVWSQRKEVEQDPGPFNVPEGATVAFNCTYSNSASQSFFWYRQDCRKEPKLLMSVYSSGNEDGRFTAQLNRASQYISLLIRDSKLSDSATYLCVVWRASGTYKYIFGTGTRLKVLANIIQNPDPAVYQLRDSKSSDKSVCLFTDFDSQTNVSQSKDSDVYITDKTVLDMRSMDFKSNSAVAWSNKSDFACANAFNNSIIPEDTFFPSPESSCDVKLVEKSFETDTNLNFQNLSVIGFRILLLKVAGFNLLMTLRLWS

SEQ ID NO: 1106 - protein, 309 aa, Homo sapiens
MGPGLLCWALLCLLGAGLVDAGVTQSPTHLIKTRGQQVTLRCSPKSGHDTVSWYQQALGQGPQFIFQYYEEEERQRGNFPDRFSGHQFPNYSSELNVNALLLGDSALYLCASSRQGSNTEAFFGQGTRLTVVEDLNKVFPPEVAVFEPSEAEISHTQKATLVCLATGFFPDHVELSWWVNGKEVHSGVSTDPQPLKEQPALNDSRYCLSSRLRVSATFWQNPRNHFRCQVQFYGLSENDEWTQDRAKPVTQIVSAEAWGRADCGFTSVSYQQGVLSATILYEILLGKATLYAVLVSALVLMAMVKRKDF

SEQ ID NO: 1107 - protein, 271 aa, Homo sapiens
MRQVARVIVFLTLSTLSLAKTTQPISMDSYEGQEVNITCSHNNIATNDYITWYQQFPSQGPRFIIQGYKTKVTNEVASLFIPADRKSSTLSLPRVSLSDTAVYYCLVGDPVTGGGNKLTFGTGTQLKVELNIIQNPDPAVYQLRDSKSSDKSVCLFTDFDSQTNVSQSKDSDVYITDKTVLDMRSMDFKSNSAVAWSNKSDFACANAFNNSIIPEDTFFPSPESSCDVKLVEKSFETDTNLNFQNLSVIGFRILLLKVAGFNLLMTLRLWS

SEQ ID NO: 1108 - protein, 310 aa, Homo sapiens
MLCSLLALLLGTFFGVRSQTIHQWPATLVQPVGSPLSLECTVEGTSNPNLYWYRQAAGRGLQLLFYSVGIGQISSEVPQNLSASRPQDRQFILSSKKLLLSDSGFYLCAWSVSAGPQSGYGYTFGSGTRLTVVEDLNKVFPPEVAVFEPSEAEISHTQKATLVCLATGFFPDHVELSWWVNGKEVHSGVSTDPQPLKEQPALNDSRYCLSSRLRVSATFWQNPRNHFRCQVQFYGLSENDEWTQDRAKPVTQIVSAEAWGRADCGFTSVSYQQGVLSATILYEILLGKATLYAVLVSALVLMAMVKRKDF

SEQ ID NO: 1109 - protein, 269 aa, Homo sapiens
METLLGLLILWLQLQWVSSKQEVTQIPAALSVPEGENLVLNCSFTDSAIYNLQWFRQDPGKGLTSLLLIQSSQREQTSGRLNASLDKSSGRSTLYIAASQPGDSATYLCAVLLKGKLIFGQGTTLQVKPDIQNPDPAVYQLRDSKSSDKSVCLFTDFDSQTNVSQSKDSDVYITDKTVLDMRSMDFKSNSAVAWSNKSDFACANAFNNSIIPEDTFFPSPESSCDVKLVEKSFETDTNLNFQNLSVIGFRILLLKVAGFNLLMTLRLWS

SEQ ID NO: 1110 - protein, 308 aa, Homo sapiens
MGSRLLCWVLLCLLGAGPVKAGVTQTPRYLIKTRGQQVTLSCSPISGHRSVSWYQQTPGQGLQFLFEYFSETQRNKGNFPGRFSGRQFSNSRSEMNVSTLELGDSALYLCASSLAAAQGYTFGSGTRLTVVEDLNKVFPPEVAVFEPSEAEISHTQKATLVCLATGFFPDHVELSWWVNGKEVHSGVSTDPQPLKEQPALNDSRYCLSSRLRVSATFWQNPRNHFRCQVQFYGLSENDEWTQDRAKPVTQIVSAEAWGRADCGFTSVSYQQGVLSATILYEILLGKATLYAVLVSALVLMAMVKRKDF

SEQ ID NO: 1111 - protein, 8 aa, Severe acute respiratory syndrome coronavirus 2
RPDTRYVL

SEQ ID NO: 1112 - protein, 274 aa, Homo sapiens
MKKHLTTFLVILWLYFYRGNGKNQVEQSPQSLIILEGKNCTLQCNYTVSPFSNLRWYKQDTGRGPVSLTIMTFSENTKSNGRYTATLDADTKQSSLHITASQLSDSASYICVVSLDPNNNDMRFGAGTRLTVKPNIQNPDPAVYQLRDSKSSDKSVCLFTDFDSQTNVSQSKDSDVYITDKTVLDMRSMDFKSNSAVAWSNKSDFACANAFNNSIIPEDTFFPSPESSCDVKLVEKSFETDTNLNFQNLSVIGFRILLLKVAGFNLLMTLRLWS

SEQ ID NO: 1113 - protein, 310 aa, Homo sapiens
MGPGLLCWVLLCLLGAGSVETGVTQSPTHLIKTRGQQVTLRCSSQSGHNTVSWYQQALGQGPQFIFQYYREEENGRGNFPPRFSGLQFPNYSSELNVNALELDDSALYLCASISSGDNEQFFGPGTRLTVLEDLKNVFPPEVAVFEPSEAEISHTQKATLVCLATGFYPDHVELSWWVNGKEVHSGVSTDPQPLKEQPALNDSRYCLSSRLRVSATFWQNPRNHFRCQVQFYGLSENDEWTQDRAKPVTQIVSAEAWGRADCGFTSESYQQGVLSATILYEILLGKATLYAVLVSALVLMAMVKRKDSRG

SEQ ID NO: 1114 - protein, 9 aa, Severe acute respiratory syndrome coronavirus 2
IPRRNVATL

SEQ ID NO: 1115 - protein, 270 aa, Homo sapiens
MLLITSMLVLWMQLSQVNGQQVMQIPQYQHVQEGEDFTTYCNSSTTLSNIQWYKQRPGGHPVFLIQLVKSGEVKKQKRLTFQFGEAKKNSSLHITATQTTDVGTYFCAGFSSGSARQLTFGSGTQLTVLPDIQNPDPAVYQLRDSKSSDKSVCLFTDFDSQTNVSQSKDSDVYITDKTVLDMRSMDFKSNSAVAWSNKSDFACANAFNNSIIPEDTFFPSPESSCDVKLVEKSFETDTNLNFQNLSVIGFRILLLKVAGFNLLMTLRLWS

SEQ ID NO: 1116 - protein, 311 aa, Homo sapiens
MSIGLLCCAALSLLWAGPVNAGVTQTPKFQVLKTGQSMTLQCAQDMNHEYMSWYRQDPGMGLRLIHYSVGAGITDQGEVPNGYNVSRSTTEDFPLRLLSAAPSQTSVYFCASSSGGGYNEQFFGPGTRLTVLEDLKNVFPPEVAVFEPSEAEISHTQKATLVCLATGFYPDHVELSWWVNGKEVHSGVSTDPQPLKEQPALNDSRYCLSSRLRVSATFWQNPRNHFRCQVQFYGLSENDEWTQDRAKPVTQIVSAEAWGRADCGFTSESYQQGVLSATILYEILLGKATLYAVLVSALVLMAMVKRKDSRG

SEQ ID NO: 1117 - protein, 10 aa, Artificial Sequence
  Description of Artificial Sequence: Synthetic peptide
GGGGSGGGGS

SEQ ID NO: 1118 - protein, 8 aa, Artificial Sequence
  Description of Artificial Sequence: Synthetic peptide
GGGSGGGS

SEQ ID NO: 1119 - protein, 11 aa, Artificial Sequence
  Description of Artificial Sequence: Synthetic peptide
GGGSGGGSGGS

SEQ ID NO: 1120 - protein, 9 aa, Unknown
  Description of Unknown: LAGLIDADG family peptide
LAGLIDADG

SEQ ID NO: 1121 - protein, 10 aa, Severe acute respiratory syndrome coronavirus 2
YLQPRTFLLK

SEQ ID NO: 1122 - protein, 10 aa, Severe acute respiratory syndrome coronavirus 2
SALWEIQQVV

SEQ ID NO: 1123 - protein, 14 aa, Severe acute respiratory syndrome coronavirus 2
ATYYLFDESGEFKL

SEQ ID NO: 1124 - protein, 10 aa, Severe acute respiratory syndrome coronavirus 2
PLLYDANYFL

SEQ ID NO: 1125 - protein, 9 aa, Severe acute respiratory syndrome coronavirus 2
RLANECAQV

SEQ ID NO: 1126 - protein, 10 aa, Severe acute respiratory syndrome coronavirus 2
QLSSYSLFDM

SEQ ID NO: 1127 - protein, 10 aa, Severe acute respiratory syndrome coronavirus 2
FLIVAAIVFI

SEQ ID NO: 1128 - protein, 8 aa, Severe acute respiratory syndrome coronavirus 2
YANSVFNI

SEQ ID NO: 1129 - protein, 13 aa, Severe acute respiratory syndrome coronavirus 2
FLCWHTNCYDYCI

SEQ ID NO: 1130 - protein, 9 aa, Severe acute respiratory syndrome coronavirus 2
SMWALIISV

SEQ ID NO: 1131 - protein, 9 aa, Severe acute respiratory syndrome coronavirus 2
LLLDRLNQL

SEQ ID NO: 1132 - protein, 9 aa, Severe acute respiratory syndrome coronavirus 2
FAFACPDGV

SEQ ID NO: 1133 - protein, 10 aa, Severe acute respiratory syndrome coronavirus 2
YRLANECAQV

SEQ ID NO: 1134 - protein, 10 aa, Severe acute respiratory syndrome coronavirus 2
GYLQPRTFLL

SEQ ID NO: 1135 - protein, 8 aa, Severe acute respiratory syndrome coronavirus 2
ALWEIQQV

SEQ ID NO: 1136 - protein, 10 aa, Severe acute respiratory syndrome coronavirus 2
ALDQAISMWA

SEQ ID NO: 1137 - protein, 10 aa, Severe acute respiratory syndrome coronavirus 2
SLFDMSKFPL

SEQ ID NO: 1138 - protein, 9 aa, Severe acute respiratory syndrome coronavirus 2
LLAKDTTEA

SEQ ID NO: 1139 - protein, 10 aa, Severe acute respiratory syndrome coronavirus 2
MDLFMRIFTI

SEQ ID NO: 1140 - protein, 10 aa, Severe acute respiratory syndrome coronavirus 2
KILGLPTQTV

SEQ ID NO: 1141 - protein, 10 aa, Severe acute respiratory syndrome coronavirus 2
SLQTYVTQQL

SEQ ID NO: 1142 - protein, 9 aa, Severe acute respiratory syndrome coronavirus 2
ALSKGVHFV

SEQ ID NO: 1143 - protein, 9 aa, Severe acute respiratory syndrome coronavirus 2
VMCGGSLYV

SEQ ID NO: 1144 - protein, 13 aa, Severe acute respiratory syndrome coronavirus 2
TYASALWEIQQVV

SEQ ID NO: 1145 - protein, 10 aa, Severe acute respiratory syndrome coronavirus 2
LLYDANYFLC

SEQ ID NO: 1146 - protein, 10 aa, Severe acute respiratory syndrome coronavirus 2
FDMSKFPLKL

SEQ ID NO: 1147 - protein, 13 aa, Severe acute respiratory syndrome coronavirus 2
TYYLFDESGEFKL

SEQ ID NO: 1148 - protein, 11 aa, Severe acute respiratory syndrome coronavirus 2
YSLFDMSKFPL

SEQ ID NO: 1149 - protein, 12 aa, Severe acute respiratory syndrome coronavirus 2
YASALWEIQQVV

SEQ ID NO: 1150 - protein, 11 aa, Severe acute respiratory syndrome coronavirus 2
FLLKYNENGTI

SEQ ID NO: 1151 - protein, 10 aa, Severe acute respiratory syndrome coronavirus 2
FTYASALWEI

SEQ ID NO: 1152 - protein, 12 aa, Severe acute respiratory syndrome coronavirus 2
YYLFDESGEFKL

SEQ ID NO: 1153 - protein, 14 aa, Severe acute respiratory syndrome coronavirus 2
RLWLCWKCRSKNPL

SEQ ID NO: 1154 - protein, 9 aa, Severe acute respiratory syndrome coronavirus 2
TVIEVQGYK

SEQ ID NO: 1155 - protein, 9 aa, Severe acute respiratory syndrome coronavirus 2
QIAPGQTGK

SEQ ID NO: 1156 - protein, 11 aa, Severe acute respiratory syndrome coronavirus 2
MMVTNNTFTLK

SEQ ID NO: 1157 - protein, 9 aa, Severe acute respiratory syndrome coronavirus 2
RLFRKSNLK

SEQ ID NO: 1158 - protein, 10 aa, Severe acute respiratory syndrome coronavirus 2
YNSASFSTFK

SEQ ID NO: 1159 - protein, 9 aa, Severe acute respiratory syndrome coronavirus 2
VTNNTFTLK

SEQ ID NO: 1160 - protein, 10 aa, Severe acute respiratory syndrome coronavirus 2
RQIAPGQTGK

SEQ ID NO: 1161 - protein, 9 aa, Severe acute respiratory syndrome coronavirus 2
KLFDRYFKY

SEQ ID NO: 1162 - protein, 9 aa, Severe acute respiratory syndrome coronavirus 2
KTIQPRVEK

SEQ ID NO: 1163 - protein, 9 aa, Severe acute respiratory syndrome coronavirus 2
CVADYSVLY

SEQ ID NO: 1164 - protein, 10 aa, Severe acute respiratory syndrome coronavirus 2
RLKLFDRYFK

SEQ ID NO: 1165 - protein, 12 aa, Severe acute respiratory syndrome coronavirus 2
STFKCYGVSPTK

SEQ ID NO: 1166 - protein, 12 aa, Severe acute respiratory syndrome coronavirus 2
VLYNSASFSTFK

SEQ ID NO: 1167 - protein, 8 aa, Severe acute respiratory syndrome coronavirus 2
KLFDRYFK

SEQ ID NO: 1168 - protein, 10 aa, Severe acute respiratory syndrome coronavirus 2
QLPQGTTLPK

SEQ ID NO: 1169 - protein, 10 aa, Severe acute respiratory syndrome coronavirus 2
VPTDNYITTY

SEQ ID NO: 1170 - protein, 10 aa, Severe acute respiratory syndrome coronavirus 2
FTSDYYQLYS

SEQ ID NO: 1171 - protein, 9 aa, Severe acute respiratory syndrome coronavirus 2
CTDDNALAY

SEQ ID NO: 1172 - protein, 10 aa, Severe acute respiratory syndrome coronavirus 2
SSPDDQIGYY

SEQ ID NO: 1173 - protein, 11 aa, Severe acute respiratory syndrome coronavirus 2
HTTDPSFLGRY

SEQ ID NO: 1174 - protein, 12 aa, Severe acute respiratory syndrome coronavirus 2
TACTDDNALAYY

SEQ ID NO: 1175 - protein, 8 aa, Severe acute respiratory syndrome coronavirus 2
TDDNALAY

SEQ ID NO: 1176 - protein, 9 aa, Severe acute respiratory syndrome coronavirus 2
GTDLEGNFY

SEQ ID NO: 1177 - protein, 9 aa, Severe acute respiratory syndrome coronavirus 2
TCDGTTFTY

SEQ ID NO: 1178 - protein, 9 aa, Severe acute respiratory syndrome coronavirus 2
SMDNSPNLA

SEQ ID NO: 1179 - protein, 12 aa, Severe acute respiratory syndrome coronavirus 2
YHTTDPSFLGRY

SEQ ID NO: 1180 - protein, 14 aa, Severe acute respiratory syndrome coronavirus 2
LTTAAKLMVVIPDY

SEQ ID NO: 1181 - protein, 10 aa, Severe acute respiratory syndrome coronavirus 2
VDTDFVNEFY

SEQ ID NO: 1182 - protein, 11 aa, Severe acute respiratory syndrome coronavirus 2
ACTDDNALAYY

SEQ ID NO: 1183 - protein, 10 aa, Severe acute respiratory syndrome coronavirus 2
YFTSDYYQLY

SEQ ID NO: 1184 - protein, 9 aa, Severe acute respiratory syndrome coronavirus 2
DTDFVNEFY

SEQ ID NO: 1185 - protein, 9 aa, Severe acute respiratory syndrome coronavirus 2
SSDNIALLV

SEQ ID NO: 1186 - protein, 10 aa, Severe acute respiratory syndrome coronavirus 2
CTDDNALAYY

SEQ ID NO: 1187 - protein, 9 aa, Severe acute respiratory syndrome coronavirus 2
LSPRWYFYY

SEQ ID NO: 1188 - protein, 13 aa, Severe acute respiratory syndrome coronavirus 2
YYHTTDPSFLGRY

SEQ ID NO: 1189 - protein, 14 aa, Severe acute respiratory syndrome coronavirus 2
EYYHTTDPSFLGRY

SEQ ID NO: 1190 - protein, 8 aa, Severe acute respiratory syndrome coronavirus 2
TSDYYQLY

SEQ ID NO: 1191 - protein, 10 aa, Severe acute respiratory syndrome coronavirus 2
ACTDDNALAY

SEQ ID NO: 1192 - protein, 10 aa, Severe acute respiratory syndrome coronavirus 2
VATSRTLSYY

SEQ ID NO: 1193 - protein, 10 aa, Severe acute respiratory syndrome coronavirus 2
NTCDGTTFTY

SEQ ID NO: 1194 - protein, 12 aa, Severe acute respiratory syndrome coronavirus 2
TVATSRTLSYYK

SEQ ID NO: 1195 - protein, 9 aa, Severe acute respiratory syndrome coronavirus 2
ASAFFGMSR

SEQ ID NO: 1196 - protein, 9 aa, Severe acute respiratory syndrome coronavirus 2
LIRQGTDYK

SEQ ID NO: 1197 - protein, 10 aa, Severe acute respiratory syndrome coronavirus 2
LLNKHIDAYK

SEQ ID NO: 1198 - protein, 9 aa, Severe acute respiratory syndrome coronavirus 2
AVILRGHLR

SEQ ID NO: 1199 - protein, 10 aa, Severe acute respiratory syndrome coronavirus 2
QDLKWARFPK

SEQ ID NO: 1200 - protein, 13 aa, Severe acute respiratory syndrome coronavirus 2
VTLACFVLAAVYR

SEQ ID NO: 1201 - protein, 9 aa, Severe acute respiratory syndrome coronavirus 2
KVKYLYFIK

SEQ ID NO: 1202 - protein, 14 aa, Severe acute respiratory syndrome coronavirus 2
STMTNRQFHQKLLK

SEQ ID NO: 1203 - protein, 9 aa, Severe acute respiratory syndrome coronavirus 2
QQQGQTVTK

SEQ ID NO: 1204 - protein, 10 aa, Severe acute respiratory syndrome coronavirus 2
ATSRTLSYYK

SEQ ID NO: 1205 - protein, 9 aa, Severe acute respiratory syndrome coronavirus 2
KSAAEASKK

SEQ ID NO: 1206 - protein, 11 aa, Severe acute respiratory syndrome coronavirus 2
KAYNVTQAFGR

SEQ ID NO: 1207 - protein, 9 aa, Severe acute respiratory syndrome coronavirus 2
VYIGDPAQL

SEQ ID NO: 1208 - protein, 9 aa, Severe acute respiratory syndrome coronavirus 2
YYRRATRRI

SEQ ID NO: 1209 - protein, 10 aa, Severe acute respiratory syndrome coronavirus 2
RWYFYYLGTG

SEQ ID NO: 1210 - protein, 10 aa, Severe acute respiratory syndrome coronavirus 2
QYIKWPWYIW

SEQ ID NO: 1211 - protein, 10 aa, Severe acute respiratory syndrome coronavirus 2
KYEQYIKWPW

SEQ ID NO: 1212 - protein, 10 aa, Severe acute respiratory syndrome coronavirus 2
KWPWYIWLGF

SEQ ID NO: 1213 - protein, 9 aa, Severe acute respiratory syndrome coronavirus 2
LYLYALVYF

SEQ ID NO: 1214 - protein, 14 aa, Severe acute respiratory syndrome coronavirus 2
LYALVYFLQSINFV

SEQ ID NO: 1215 - protein, 14 aa, Severe acute respiratory syndrome coronavirus 2
YLYALVYFLQSINF

SEQ ID NO: 1216 - protein, 13 aa, Severe acute respiratory syndrome coronavirus 2
QYIKWPWYIWLGF

SEQ ID NO: 1217 - protein, 13 aa, Severe acute respiratory syndrome coronavirus 2
LYALVYFLQSINF

SEQ ID NO: 1218 - protein, 10 aa, Severe acute respiratory syndrome coronavirus 2
SPRWYFYYLG

SEQ ID NO: 1219 - protein, 9 aa, Severe acute respiratory syndrome coronavirus 2
SPRWYFYYL

SEQ ID NO: 1220 - protein, 9 aa, Severe acute respiratory syndrome coronavirus 2
RPDTRYVLM

SEQ ID NO: 1221 - protein, 10 aa, Severe acute respiratory syndrome coronavirus 2
IPRRNVATLQ

SEQ ID NO: 1222 - protein, 10 aa, Severe acute respiratory syndrome coronavirus 2
EIPRRNVATL

SEQ ID NO: 1223 - protein, 8 aa, Severe acute respiratory syndrome coronavirus 2
PRWYFYYL

SEQ ID NO: 1224 - protein, 10 aa, Severe acute respiratory syndrome coronavirus 2
LSPRWYFYYL

SEQ ID NO: 1225 - protein, 9 aa, Severe acute respiratory syndrome coronavirus 2
RIRGGDGKM

SEQ ID NO: 1226 - protein, 14 aa, Severe acute respiratory syndrome coronavirus 2
SLEIPRRNVATLQA

SEQ ID NO: 1227 - protein, 9 aa, Cytomegalovirus sp.
NLVPMVATV

SEQ ID NO: 1228 - protein, 10 aa, Unknown
  Description of Unknown: T cell epitope sequence
FIYASALWEI

SEQ ID NO: 1229 - protein, 10 aa, Unknown
  Description of Unknown: T cell epitope sequence
FLLTFNDNQA

SEQ ID NO: 1230 - protein, 10 aa, Unknown
  Description of Unknown: T cell epitope sequence
FLFDMSKFPL

SEQ ID NO: 1231 - protein, 9 aa, Unknown
  Description of Unknown: T cell epitope sequence
WLDARMQAI

SEQ ID NO: 1232 - protein, 9 aa, Unknown
  Description of Unknown: T cell epitope sequence
YVLDHLIVV

SEQ ID NO: 1233 - protein, 9 aa, Unknown
  Description of Unknown: T cell epitope sequence
NLLDSYFVV

SEQ ID NO: 1234 - protein, 10 aa, Unknown
  Description of Unknown: T cell epitope sequence
NVYADSFVVK

SEQ ID NO: 1235 - protein, 9 aa, Unknown
  Description of Unknown: T cell epitope sequence
SVYAWERKK

SEQ ID NO: 1236 - protein, 9 aa, Unknown
  Description of Unknown: T cell epitope sequence
NMHLSTLMK

SEQ ID NO: 1237 - protein, 8 aa, Unknown
  Description of Unknown: T cell epitope sequence
VLLVDGHK

SEQ ID NO: 1238 - protein, 11 aa, Unknown
  Description of Unknown: T cell epitope sequence
AVMQKLPCQFK

SEQ ID NO: 1239 - protein, 10 aa, Unknown
  Description of Unknown: T cell epitope sequence
KTVPAGNLVK

SEQ ID NO: 1240 - protein, 9 aa, Unknown
  Description of Unknown: T cell epitope sequence
RLRAEAQVK

SEQ ID NO: 1241 - protein, 10 aa, Unknown
  Description of Unknown: T cell epitope sequence
LILRGSVAHK

SEQ ID NO: 1242 - protein, 11 aa, Unknown
  Description of Unknown: T cell epitope sequence
KTRPILSPLTK

SEQ ID NO: 1243 - protein, 9 aa, Unknown
  Description of Unknown: OC43 sequence
KLWHYCSTL

SEQ ID NO: 1244 - protein, 9 aa, Unknown
  Description of Unknown: HKU1 sequence
KLWQYCSVL

SEQ ID NO: 1245 - protein, 9 aa, Unknown
  Description of Unknown: NL63 sequence
SEWAYCVDL

SEQ ID NO: 1246 - protein, 9 aa, Unknown
  Description of Unknown: 229E sequence
KEWAYCVEM

SEQ ID NO: 1247 - protein, 9 aa, Unknown
  Description of Unknown: HKU1 sequence
LPRWYFYYL

SEQ ID NO: 1248 - protein, 9 aa, Unknown
  Description of Unknown: NL63 sequence
PPKVHFYYL

SEQ ID NO: 1249 - protein, 9 aa, Unknown
  Description of Unknown: 229E sequence
SPKLHFYYL

SEQ ID NO: 1250 - protein, 9 aa, Severe acute respiratory syndrome-related coronavirus
KLWAQCVQL

SEQ ID NO: 1251 - protein, 9 aa, Severe acute respiratory syndrome-related coronavirus
SPRWYFYYL

SEQ ID NO: 1252 - protein, 9 aa, Unknown
  Description of Unknown: OC43 sequence
LPRWYFYYL

SEQ ID NO: 1253 - protein, 20 aa, Artificial Sequence
  Description of Artificial Sequence: Synthetic peptide
  SITE (1)..(10): This region may encompass 0-10 residues
  SITE (11)..(20): This region may encompass 0-10 residues
  See specification as filed for detailed description of substitutions and preferred embodiments
GGGGGGGGGGSSSSSSSSSS

SEQ ID NO: 1254 - protein, 9 aa, Unknown
  Description of Unknown: T cell epitope sequence
KLWAQCVQL

SEQ ID NO: 1255 - protein, 9 aa, Unknown
  Description of Unknown: T cell epitope sequence
LLAKDTTEA

SEQ ID NO: 1256 - protein, 9 aa, Unknown
  Description of Unknown: T cell epitope sequence
LLYDANYFL

SEQ ID NO: 1257 - protein, 9 aa, Unknown
  Description of Unknown: T cell epitope sequence
YLQPRTFLL

SEQ ID NO: 1258 - protein, 10 aa, Unknown
  Description of Unknown: T cell epitope sequence
FTYASALWEI

SEQ ID NO: 1259 - protein, 9 aa, Unknown
  Description of Unknown: T cell epitope sequence
LLLDRLNQL

SEQ ID NO: 1260 - protein, 10 aa, Unknown
  Description of Unknown: T cell epitope sequence
SLFDMSKFPL

SEQ ID NO: 1261 - protein, 11 aa, Unknown
  Description of Unknown: T cell epitope sequence
YLFDESGEFKL

SEQ ID NO: 1262 - protein, 9 aa, Unknown
  Description of Unknown: T cell epitope sequence
NLVPMVATV

SEQ ID NO: 1263 - protein, 10 aa, Unknown
  Description of Unknown: T cell epitope sequence
KTFPPTEPKK

SEQ ID NO: 1264 - protein, 9 aa, Unknown
  Description of Unknown: T cell epitope sequence
KCYGVSPTK

SEQ ID NO: 1265 - protein, 10 aa, Unknown
  Description of Unknown: T cell epitope sequence
QLPQGTTLPK

SEQ ID NO: 1266 - protein, 8 aa, Unknown
  Description of Unknown: T cell epitope sequence
KLFDRYFK

SEQ ID NO: 1267 - protein, 9 aa, Unknown
  Description of Unknown: T cell epitope sequence
RLFRKSNLK
